(19) United States
(12) Patent Application Publication
(10) Pub. No.: US 2024/0218367 A1
(43) Pub. Date: Jul. 4, 2024

(54) Targeted Destruction of Viral RNA by CRISPR-Cas13

(71) Applicant: University of Rochester, Rochester, NY (US)

(72) Inventor: Douglas Matthew Anderson, Pittsford, NY (US)

(21) Appl. No.: 17/907,121

(22) PCT Filed: Mar. 26, 2021
(86) PCT No.: PCT/US2021/024397

§ 371 Date: Sep. 23, 2022

(51) Int. Cl. C12N 15/113; A61P 31/16; C07K 14/005; C12N 9/22; C12N 15/86

(52) U.S. Cl. CPC C12N 15/1131; A61P 31/16; C07K 14/005; C12N 9/22; C12N 15/86; C12N 2310/20; C12N 2740/15043; C12N 2740/15052; C12N 2770/20022

(57) ABSTRACT

The disclosure provides CRISPR RNAs and methods of treating viral infections.

### CROSS-REFERENCE TO RELATED APPLICATIONS

[0001] The present application claims priority to U.S. Provisional Application Ser. No. 63/000,737, filed on Mar. 27, 2020, and U.S. Provisional Application Ser. No. 63/052,282, filed on Jul. 15, 2020, each of which is incorporated by reference herein in its entirety.

### BACKGROUND

[0002] Coronaviruses are enveloped, single-stranded RNA viruses which are widespread in nature and pathogenic in both animal and human populations. Bovine coronavirus is a major cause of calf scours, winter dysentery in adult cows and cause a significant percentage of bovine respiratory disease. In humans, coronaviruses induce pathogenic respiratory diseases, notably SARS, MERS and more recently COVID-19, which have potential to become global pandemics. There are currently no vaccines available to treat human coronavirus infections. In animals, factors limiting vaccine efficacy, such as age, vaccine non-responders and virus mutation, highlights a need for alternative targeted therapeutics to prevent coronavirus-related death and disease.

### SUMMARY OF THE INVENTION

[0003] In one embodiment, the disclosure provides a method for treating a viral infection. In one embodiment, the method comprises administering to the subject: (a) CRISPR RNA (crRNA) comprising guide sequence substantially complementary to a viral RNA sequence and (b) a Cas protein or nucleic acid encoding the Cas protein.

[0004] In one embodiment, the Cas protein is Cas13. In one embodiment, the Cas protein comprises a sequence at least 80% identical to a sequence selected from SEQ ID NOs:1-47. In one embodiment, the Cas protein further comprises a localization signal or export signal. In one embodiment, the Cas protein comprises an NES, wherein the NES comprises a sequence at least 80% identical to SEQ ID NOs:58-59. In one embodiment, the Cas protein comprises a nuclear localization signal (NLS), wherein the NLS comprises a sequence at least 80% identical to SEQ ID NOs: 50-57 and 298-910. In one embodiment, the Cas protein comprises a localization signal, wherein the localization signal comprises a sequence at least 80% identical to SEQ ID NOs: 60-66. In one embodiment, the Cas protein comprises a sequence at least 80% identical to SEQ ID NOs: 68-100.

[0005] In one embodiment, the nucleic acid encoding the Cas protein comprises a sequence at least 80% identical to SEQ ID NOs:132-133. In one embodiment, the nucleic acid encoding the Cas protein comprises a sequence at least 80% identical to SEQ ID NOs:147-166.

[0006] In one embodiment, the viral infection is a coronavirus infection and the guide sequence is substantially complementary to a Coronavirus genomic mRNA sequence or a Coronavirus subgenomic mRNA sequence.

[0007] In one embodiment, the guide sequence is substantially complementary to a Coronavirus leader sequence, Coronavirus S sequence, Coronavirus E sequence, Coronavirus M sequence, N sequence, or Coronavirus S2M sequence. In one embodiment, the guide sequence is substantially complementary to a sequence at least at least 80% homologous to a sequence selected from SEQ ID NOs: 168-174, 176-181, 186, and 187. In one embodiment, the guide sequence comprises a sequence at least at least 80% homologous to a sequence selected from SEQ ID NOs: 189-224.

[0008] In one embodiment, the viral infection is an influenza infection and the guide sequence comprises is substantially complementary to an influenza virus genomic RNA sequence or an influenza virus subgenomic RNA sequence.

[0009] In one embodiment, the guide sequence is substantially complementary to an influenza virus PB2 sequence, influenza virus PB1 sequence, influenza virus PA sequence, influenza virus NP sequence, or influenza virus M sequence. In one embodiment, the guide sequence is substantially complementary to a sequence at least 80% homologous to a sequence selected from SEQ ID NOs:225-244. In one embodiment, the guide sequence comprises a sequence at least 80% homologous to a sequence selected from SEQ ID NOs: 245-264.

[0010] In one embodiment, the crRNA further comprises a direct repeat (DR) sequence. In one embodiment, the DR sequence is 3′ from the guide sequence. In one embodiment, the DR sequence comprises a sequence selected from SEQ ID NOs: 265-274.

[0011] In one embodiment, the disclosure provides a delivery system comprising: a packaging plasmid a transfer plasmid, and an envelope plasmid, wherein the packaging plasmid comprises a nucleic acid sequence encoding a gag-pol polyprotein; the transfer plasmid comprises a nucleic acid sequence encoding a crRNA sequence and a nucleic acid sequence encoding a Cas protein; and the envelope plasmid comprises a nucleic acid sequence encoding an envelope protein.

[0012] In one embodiment, the Cas protein comprises a sequence at least 80% identical to a sequence selected from SEQ ID NOs:1-47. In one embodiment, the Cas protein further comprises a localization signal or export signal. In one embodiment, the localization signal or export signal comprises a sequence 80% identical to a sequence selected from SEQ ID NOs:50-66 and 298-910.

[0013] In one embodiment, the envelope protein is a coronavirus spike glycoprotein. In one embodiment, the envelope protein comprises a sequence at least 80% identical to a sequence selected from SEQ ID NOs:101-130.

[0014] In one embodiment, the crRNA sequence comprises a guide sequence substantially complementary to a Coronavirus genomic mRNA sequence or a Coronavirus subgenomic mRNA sequence. In one embodiment, the guide sequence is substantially complementary to a Coronavirus leader sequence, Coronavirus S sequence, Coronavirus E sequence, Coronavirus M sequence, N sequence, or Coronavirus S2M sequence. In one embodiment, the guide sequence is substantially complementary to a sequence at least at least 80% homologous to a sequence selected from SEQ ID NOs: 168-174, 176-181, 186, and 187. In one embodiment, the guide sequence comprises a sequence at least at least 80% homologous to a sequence selected from SEQ ID NOs: 189-224.

[0015] In one embodiment, the envelope protein comprises one or more proteins selected from influenza virus HA protein and influenza virus NA protein.

[0016] In one embodiment, the crRNA sequence comprises a guide sequence substantially complementary to an influenza virus genomic RNA sequence or an influenza virus subgenomic RNA sequence. In one embodiment, the guide sequence is substantially complementary to an influenza virus PB2 sequence, influenza virus PB1 sequence, influenza virus PA sequence, influenza virus NP sequence, or influenza virus M sequence. In one embodiment, the guide sequence is substantially complementary to a sequence at least 80% homologous to a sequence selected from SEQ ID NOs:225-244. In one embodiment, the guide sequence comprises a sequence at least 80% homologous to a sequence selected from SEQ ID NOs: 245-264.

[0017] In one embodiment, the disclosure provides a CRISPR RNA (crRNA) comprising a guide sequence, wherein the guide sequence is substantially complementary to a Coronavirus genomic mRNA sequence or a Coronavirus subgenomic mRNA sequence. In one embodiment, the guide sequence is substantially complementary to a Coronavirus leader sequence, Coronavirus S sequence, Coronavirus E sequence, Coronavirus M sequence, N sequence, or Coronavirus S2M sequence. In one embodiment, the guide sequence is substantially complementary to a sequence at least 80% homologous to a sequence selected from SEQ ID NOs: 168-174, 176-181, 186, and 187. In one embodiment, the guide sequence comprises a sequence at least 80% homologous to a sequence selected from SEQ ID NOs: 189-224.

[0018] In one embodiment, the disclosure provides a CRISPR RNA (crRNA) comprising a guide sequence, wherein the guide sequence is substantially complementary to an influenza virus genomic RNA sequence or an influenza virus subgenomic RNA sequence. In one embodiment, the guide sequence is substantially complementary to an influenza virus PB2 sequence, influenza virus PB1 sequence, influenza virus PA sequence, influenza virus NP sequence, or influenza virus M sequence. In one embodiment, the guide sequence is substantially complementary to a sequence at least 80% homologous to a sequence selected from SEQ ID NOs: 225-244. In one embodiment, the guide sequence comprises a sequence at least 80% homologous to a sequence selected from SEQ ID NOs: 245-264.

[0019] In one embodiment, the crRNA further comprises a direct repeat (DR) sequence. In one embodiment, the DR sequence is 3′ from the guide sequence. In one embodiment, the DR sequence comprises a sequence selected from SEQ ID NOs: 265-274.

[0020] In one embodiment, the disclosure provides a tandem array comprising at least two crRNA of the disclosure.

[0021] In one embodiment, the disclosure provides a composition comprising a crRNA of the disclosure or a tandem array of the disclosure. In one embodiment, composition further comprises a Cas protein or a nucleic acid encoding a Cas protein. In one embodiment, the Cas protein is Cas13. In one embodiment, the Cas protein comprises a sequence at least 80% identical to a sequence selected from SEQ ID NOs:1-47. In one embodiment, the Cas protein further comprises a localization signal or export signal. In one embodiment, localization signal or export signal comprises a sequence 80% identical to a sequence selected from SEQ ID NOs:50-66 and 298-910. In one embodiment, the Cas protein comprises a sequence 80% identical to a sequence selected from SEQ ID NOs: 68-100.

### BRIEF DESCRIPTION OF THE DRAWINGS

[0022] The following detailed description of various embodiments of the invention will be better understood when read in conjunction with the appended drawings. For the purpose of illustrating the invention, there are shown in the drawing's illustrative embodiments. It should be understood, however, that the invention is not limited to the precise arrangements and instrumentalities of the embodiments shown in the drawings.

[0023] FIG. 1 depicts a schematic of the Coronavirus genomic and subgenomic mRNAs.

[0024] FIG. 2 depicts a schematic of the eraseR platform.

[0025] FIG. 3 depicts a schematic of delivery via pseudotyped integration-deficient lentiviral vectors.

[0026] FIG. 4, comprising FIG. 4A through FIG. 4C, depicts a schematic of guide-RNA testing, lentiviral production and cellular targeting. FIG. 4A depicts a schematic of the design of luciferase report construct encoding 5′ and 3′ CoV target sequences. FIG. 4B depict a schematic demonstrating the lentiviral constructs encoding CRISPR-Cas13 components can be packaged into non-integrating lentiviral particles pseudotyped with viral envelope proteins, for example, the Spike glycoprotein from SARS-CoV-2 coronavirus, which provides specificity for entry into ACE2 receptor expressing cells. This allows for specific targeting of ‘coronavirus-targeted’ cell types. FIG. 4C depicts a schematic demonstrating that post-transduction, processing and formation of non-integrating lentiviral episomes allows for transient expression of CRISPR-Cas13 components for acute targeted degradation of CoV genomic and subgenomic viral mRNAs.

[0027] FIG. 5 depicts SARS-CoV-2 leader sequence conservation and targeting sites.

[0028] FIG. 6 depicts tiling of SARS-CoV-2 Leader crRNAs.

[0029] FIG. 7, comprising FIG. 7A through FIG. 7C depicts validated CRISPR-Cas13 guide-RNAs targeting the SARS-CoV-2 Leader Sequence. FIG. 7A depicts a schematic depicting the Luciferase reporter containing the SARS-2-CoV Leader sequence and crRNA target sites locations. FIG. 7B depicts a sequence alignment of tiling crRNAs targeting SARS-CoV-2 Leader sequence. Transcriptional Regulatory Sequence (TRS) is highlighted in yellow. FIG. 7C depicts cell-based luciferase assays demonstrating robust knockdown of CoV Leader Luc reporter activity in cells with crRNAs targeting SARS-CoV-2 leader sequence (crRNAs A through G) or Luciferase coding sequence (Luc), relative to a non-targeting crRNA.

[0030] FIG. 8, comprising FIG. 8A through FIG. 8C depicts, validated CRISPR-Cas13 guide-RNAs targeting the SARS-CoV-2 Stem-loop Like-2 (S2M) Sequence. FIG. 8A depicts a schematic depicting the Luciferase reporter containing the SARS-2-CoV S2M sequence and crRNA target sites locations. FIG. 8B depicts a sequence alignment of tiling crRNAs targeting SARS-CoV-2 S2M sequence. FIG. 8C depicts cell-based luciferase assays demonstrating robust knockdown of CoV S2M Luc reporter activity in cells with crRNAs targeting SARS-CoV-2 S2M sequence (crRNAs A through F) or Luciferase coding sequence (Luc), relative to a non-targeting crRNA.

[0031] FIG. 9, comprising FIG. 9A through FIG. 9E, depicts one-step directional assembly of CRISPR-Cas13 crRNA arrays. FIG. 9A is a schematic depicting the genomic organization of a bacterial CRISPR-Cas13 locus, which typically consists of a single Cas13 protein and CRISPR array containing multiple Spacer and Direct Repeat (DR) sequences. FIG. 9B is a schematic demonstrating that each functional CRISPR guide RNA is processed to include a Spacer and Direct Repeat. Spacer sequences are anti-sense to Target sequences and provide target specificity, whereas the DR sequence acts as a handle for binding to Cas13 protein. FIG. 9C is a schematic depicting that mammalian crRNA expression cassettes are typically constructed by annealing and ligating oligonucleotides comprising a desired spacer sequence. FIG. 9D is a schematic demonstrating that harnessing tolerable nucleotide substitutions within the loop region of the DR, multiple guide-RNAs are efficiently generated in an ordered array FIG. 9E depicts potential tolerable nucleotide substitutions within the loop region of PspCas13b DR which could be harnessed for array assembly.

[0032] FIG. 10, comprising FIG. 10A through FIG. 10C, depicts the identification and validation of non-essential loop residues in Cas13b Direct Repeat (DR). FIG. 10A depicts all possible mutations at positions T17 and T18 of the PspCas13b Direct Repeat. FIG. 10B is a schematic depicting the Luciferase reporter and crRNA target sites locations. FIG. 10C depicts experimental results demonstrating CRISPR-Cas13b knockdown of Luciferase activity with two independent guide RNAs containing individual DR loop mutations.

[0033] FIG. 10, comprising FIG. 10A through FIG. 10C, depicts the identification and validation of non-essential loop residues in Cas13b Direct Repeat (DR). FIG. 10A depicts all possible mutations at positions T17 and T18 of the PspCas13b Direct Repeat. FIG. 10B is a schematic depicting the Luciferase reporter and crRNA target sites locations. FIG. 10C depicts experimental results demonstrating CRISPR-Cas13b knockdown of Luciferase activity with two independent guide RNAs containing individual DR loop mutations.

[0034] FIG. 11, comprising FIG. 11A through FIG. 11C, depicts targeted knockdown of a SARS-CoV-2 Luciferase Reporter with a Guide-RNA array. FIG. 11A is a schematic depicting the lentiviral gene transfer plasmids encoding CRISPR-Cas13 expression cassettes encoding either single or triple guide RNA arrays. FIG. 11B is a schematic of a Luciferase reporter containing multiple SARS-CoV-2 viral sequences within the 5′ and 3′ UTRs. FIG. 11C depicts experimental results demonstrating relative luciferase activity knockdown through expression of CRISPR-Cas13 RNA targeting components driven by single (LDR-D) or triple guide-RNAs (LDR-D/N-B/S2M-D) targeting the SARS-CoV-2 luciferase reporter, relative to negative control non-targeting crRNA (NC).

[0035] FIG. 12 is a schematic of the CRISPR-Cas13 expression cassette encoding triple guide RNAs can be packaged in AAV viral vectors.

[0036] FIG. 13, comprising FIG. 13A and FIG. 13B, is a schematic of the influenza virus. FIG. 13A is a schematic of Influenza viral RNAs (vRNAs). Influenza is an enveloped, negative-sense RNA virus which is composed of 8 vRNA segments. FIG. 13A is a schematic of influenza virus particles. All eight vRNAs are packed within an enveloped virus which utilizes viral proteins HA and NA for host cell binding and fusion.

[0037] FIG. 14, comprising FIG. 14A and FIG. 14B, is a schematic of the Packaging and Delivery CRISPR-Cas13 RNA editing components to target Influenza. FIG. 14A is a schematic demonstrating that the CRISPR-Cas13 editing components, including a CRISPR guide RNA array and Cas13 protein, can be packaged into viral gene therapy vectors, for example, integration deficient lentiviral vectors. Pseudotyping of lentiviral vectors with Influenza NA and HA envelope proteins is one method for delivery to host cells targeted by Influenza virus. FIG. 14A is a schematic demonstrating that upon viral vector fusion and delivery, expression of CRISPR-Cas13 components will result in targeted degradation of vRNAs or viral mRNAs. For targeting of vRNAs, robust nuclear localization of Cas13 protein may be necessary.

[0038] FIG. 15, comprising FIG. 15A and FIG. 15B, depicts experimental results demonstrating pseudotyping lentiviral vectors with SARS-CoV spike envelope proteins. FIG. 15A is a schematic demonstrating that N and C-terminal modifications (4LV) are required for pseudotyping lentivirus with CoV Spike proteins from SARS-Cov-1 and SARS-CoV-2. FIG. 15B depicts experimental results demonstrating that wild type (WT) CoV spike proteins are not suitable for pseudotyping lentivirus for transduction of HEK293T cells or HEK293T cells expressing human ACE2 (ACE2-HEK293T). Expression of the human ACE2 receptor in HEK293T cells is both necessary and sufficient for transduction by 4LV pseudotyped lentiviral vectors. VSV-G envelopes allow for pseudotyping lentivirus for broad transduction of many cell types in vitro, independent of ACE2 expression.

[0039] FIG. 16, comprising FIG. 16A and FIG. 16B, depicts experimental results demonstrating the activity of Cas13b crRNAs targeting Positive- and Negative-sense highly conserved Influenza A RNA sequences. FIG. 16A depicts experimental results of guide RNAs targeting positive-sense conserved RNA sequences in Influenza A Segments 1, 2, 3, 5 and 7. FIG. 16B depicts experimental results of negative-sense conserved RNA sequences in Influenza A Segments 1, 2, 3, 5 and 7. All Influenza A targeting crRNAs showed robust knockdown efficiency of luciferase reporters carrying corresponding Influenza A Segment-specific target sequences, relative to a non-targeting (NT) crRNA.

### DETAILED DESCRIPTION

[0040] In one aspect, the disclosure provides novel CRISPR RNAs (crRNAs) for targeting a viral RNA such as a coronavirus or an influenza virus. For example, in one embodiment, the crRNA comprises a guide sequence that is substantially complementary to a coronavirus genomic mRNA, coronavirus sub-genomic mRNA, influenza virus genomic RNA, or influenza virus sub-genomic RNA. In one embodiment, the crRNA comprises a guide sequence that is substantially complementary to a Coronavirus leader sequence, Coronavirus S sequence, Coronavirus E sequence, Coronavirus M sequence, N sequence, or Coronavirus S2M sequence. In one embodiment, the crRNA comprises a guide sequence is substantially complementary to an influenza virus PB2 sequence, influenza virus PB1 sequence, influenza virus PA sequence, influenza virus NP sequence, or influenza virus M sequence.

[0041] In one aspect, the disclosure provides a crRNA tandem array. In one embodiment, the tandem array comprises two or more, three or more, four or more, five or more six or more, seven or more or eight or more crRNA sequences. In one embodiment, each crRNA in the tandem crRNA array comprises a direct repeat (DR) sequence. The DR sequence of each crRNA array can be different. For example, in one embodiment, at least one of the DR sequences includes a single mutation in the poly T stretch.

[0042] In one aspect, the disclosure is based on the development of novel proteins which provide targeted RNA cleavage. In one embodiment, the fusion protein comprises a Cas protein, and optionally a localization signal. These proteins allow for specific localization of Cas proteins providing targeted RNA cleavage. In one embodiment, the Cas protein has RNA binding activity. In one embodiment, Cas protein is Cas13. In one embodiment, the localization signal is a nuclear localization signal, nuclear export signal or other localization signal that localizes the protein to an extracellularly or to an organelle such as the nucleolus, ribosome, vesicle, rough endoplasmic reticulum, Golgi apparatus, cytoskeleton, smooth endoplasmic reticulum, mitochondria, vacuole, cytosol, lysosome, or centriole.

### Definitions

[0043] Unless defined otherwise, all technical and scientific terms used herein have the same meaning as commonly understood by one of ordinary skill in the art to which this invention belongs.

[0044] Generally, the nomenclature used herein and the laboratory procedures in cell culture, molecular genetics, organic chemistry, and nucleic acid chemistry and hybridization are those well-known and commonly employed in the art.

[0045] Standard techniques are used for nucleic acid and peptide synthesis. The techniques and procedures are generally performed according to conventional methods in the art and various general references (e.g., Sambrook and Russell, 2012, Molecular Cloning, A Laboratory Approach, Cold Spring Harbor Press, Cold Spring Harbor, NY, and Ausubel et al., 2012, Current Protocols in Molecular Biology, John Wiley & Sons, NY), which are provided throughout this document.

[0046] The nomenclature used herein, and the laboratory procedures used in analytical chemistry and organic syntheses described below are those well-known and commonly employed in the art. Standard techniques or modifications thereof are used for chemical syntheses and chemical analyses.

[0047] The term “a,” “an,” “the” and similar terms used in the context of the present invention (especially in the context of the claims) are to be construed to cover both the singular and plural unless otherwise indicated herein or clearly contradicted by the context.

[0048] “About” as used herein when referring to a measurable value such as an amount, a temporal duration, and the like, is meant to encompass variations of ±20%, or ±10%, or ±5%, or ±1%, or ±0.1% from the specified value, as such variations are appropriate to perform the disclosed methods.

[0049] “Antisense” refers particularly to the nucleic acid sequence of the non-coding strand of a double stranded DNA molecule encoding a protein, or to a sequence which is substantially homologous to the non-coding strand. As defined herein, an antisense sequence is complementary to the sequence of a double stranded DNA molecule encoding a protein. It is not necessary that the antisense sequence be complementary solely to the coding portion of the coding strand of the DNA molecule. The antisense sequence may be complementary to regulatory sequences specified on the coding strand of a DNA molecule encoding a protein, which regulatory sequences control expression of the coding sequences.

[0050] A “disease” is a state of health of an animal wherein the animal cannot maintain homeostasis, and wherein if the disease is not ameliorated then the animal's health continues to deteriorate.

[0051] In contrast, a “disorder” in an animal is a state of health in which the animal is able to maintain homeostasis, but in which the animal's state of health is less favorable than it would be in the absence of the disorder. Left untreated, a disorder does not necessarily cause a further decrease in the animal's state of health.

[0052] A disease or disorder is “alleviated” if the severity of a sign or symptom of the disease or disorder, the frequency with which such a sign or symptom is experienced by a patient, or both, is reduced.

[0053] “Encoding” refers to the inherent property of specific sequences of nucleotides in a polynucleotide, such as a gene, a cDNA, or an mRNA, to serve as templates for synthesis of other polymers and macromolecules in biological processes having either a defined sequence of nucleotides (i.e., rRNA, tRNA and mRNA) or a defined sequence of amino acids and the biological properties resulting therefrom. Thus, a gene encodes a protein if transcription and translation of mRNA corresponding to that gene produces the protein in a cell or other biological system. Both the coding strand, the nucleotide sequence of which is identical to the mRNA sequence and is usually provided in sequence listings, and the non-coding strand, used as the template for transcription of a gene or cDNA, can be referred to as encoding the protein or other product of that gene or cDNA.

[0054] The terms “patient,” “subject,” “individual,” and the like are used interchangeably herein, and refer to any animal or cell whether in vitro or in vivo, amenable to the methods described herein. In one embodiment, the subjects include vertebrates and invertebrates. Invertebrates include, but are not limited to, Drosophila melanogaster and Caenorhabditis elegans. Vertebrates include, but are not limited to, primates, rodents, domestic animals or game animals. Primates include, but are not limited to, chimpanzees, cynomolgous monkeys, spider monkeys, and macaques (e.g., Rhesus). Rodents include, but are not limited to, mice, rats, woodchucks, ferrets, rabbits and hamsters. Domestic and game animals include, but are not limited to, cows, horses, pigs, deer, bison, buffalo, feline species (e.g., domestic cat), canine species (e.g., dog, fox, wolf), avian species (e.g., chicken, emu, ostrich), and fish (e.g., zebrafish, trout, catfish and salmon). In some embodiments, the subject is a mammal, e.g., a primate, e.g., a human. In certain non-limiting embodiments, the patient, subject or individual is a human.

[0055] By the term “specifically binds,” as used herein with respect to an antibody, is meant an antibody which recognizes a specific antigen, but does not substantially recognize or bind other molecules in a sample. For example, an antibody that specifically binds to an antigen from one species may also bind to that antigen from one or more species. But, such cross-species reactivity does not itself alter the classification of an antibody as specific. In another example, an antibody that specifically binds to an antigen may also bind to different allelic forms of the antigen. However, such cross reactivity does not itself alter the classification of an antibody as specific.

[0056] In some instances, the terms “specific binding” or “specifically binding,” can be used in reference to the interaction of an antibody, a protein, or a peptide with a second chemical species, to mean that the interaction is dependent upon the presence of a particular structure (e.g., an antigenic determinant or epitope) on the chemical species; for example, an antibody recognizes and binds to a specific protein structure rather than to proteins generally. If an antibody is specific for epitope “A”, the presence of a molecule containing epitope A (or free, unlabeled A), in a reaction containing labeled “A” and the antibody, will reduce the amount of labeled A bound to the antibody.

[0057] A “coding region” of a gene consists of the nucleotide residues of the coding strand of the gene and the nucleotides of the non-coding strand of the gene which are homologous with or complementary to, respectively, the coding region of an mRNA molecule which is produced by transcription of the gene.

[0058] A “coding region” of a mRNA molecule also consists of the nucleotide residues of the mRNA molecule which are matched with an anti-codon region of a transfer RNA molecule during translation of the mRNA molecule or which encode a stop codon. The coding region may thus include nucleotide residues comprising codons for amino acid residues which are not present in the mature protein encoded by the mRNA molecule (e.g., amino acid residues in a protein export signal sequence).

[0059] “Complementary” as used herein to refer to a nucleic acid, refers to the broad concept of sequence complementarity between regions of two nucleic acid strands or between two regions of the same nucleic acid strand. It is known that an adenine residue of a first nucleic acid region is capable of forming specific hydrogen bonds (“base pairing”) with a residue of a second nucleic acid region which is antiparallel to the first region if the residue is thymine or uracil. Similarly, it is known that a cytosine residue of a first nucleic acid strand is capable of base pairing with a residue of a second nucleic acid strand which is antiparallel to the first strand if the residue is guanine. A first region of a nucleic acid is complementary to a second region of the same or a different nucleic acid if, when the two regions are arranged in an antiparallel fashion, at least one nucleotide residue of the first region is capable of base pairing with a residue of the second region. In one embodiment, the first region comprises a first portion and the second region comprises a second portion, whereby, when the first and second portions are arranged in an antiparallel fashion, at least about 50%, at least about 75%, at least about 90%, or at least about 95% of the nucleotide residues of the first portion are capable of base pairing with nucleotide residues in the second portion. In one embodiment, all nucleotide residues of the first portion are capable of base pairing with nucleotide residues in the second portion.

[0060] The term “DNA” as used herein is defined as deoxyribonucleic acid.

[0061] The term “expression” as used herein is defined as the transcription and/or translation of a particular nucleotide sequence driven by its promoter.

[0062] The term “expression vector” as used herein refers to a vector containing a nucleic acid sequence coding for at least part of a gene product capable of being transcribed. In some cases, RNA molecules are then translated into a protein, polypeptide, or peptide. In other cases, these sequences are not translated, for example, in the production of antisense molecules, siRNA, ribozymes, and the like. Expression vectors can contain a variety of control sequences, which refer to nucleic acid sequences necessary for the transcription and possibly translation of an operatively linked coding sequence in a particular host organism. In addition to control sequences that govern transcription and translation, vectors and expression vectors may contain nucleic acid sequences that serve other functions as well.

[0063] As used herein the term “wild type” is a term of the art understood by skilled persons and means the typical form of an organism, strain, gene or characteristic as it occurs in nature as distinguished from mutant or variant forms.

[0064] The term “homology” refers to a degree of complementarity. There may be partial homology or complete homology (i.e., identity). Homology is often measured using sequence analysis software (e.g., Sequence Analysis Software Package of the Genetics Computer Group. University of Wisconsin Biotechnology Center. 1710 University Avenue. Madison, Wis. 53705). Such software matches similar sequences by assigning degrees of homology to various substitutions, deletions, insertions, and other modifications. Conservative substitutions typically include substitutions within the following groups: glycine, alanine; valine, isoleucine, leucine; aspartic acid, glutamic acid, asparagine, glutamine; serine, threonine; lysine, arginine; and phenylalanine, tyrosine.

[0065] By “nucleic acid” is meant any nucleic acid, whether composed of deoxyribonucleosides or ribonucleosides, and whether composed of phosphodiester linkages or modified linkages such as phosphotriester, phosphoramidate, siloxane, carbonate, carboxymethylester, acetamidate, carbamate, thioether, bridged phosphoramidate, bridged methylene phosphonate, phosphorothioate, methylphosphonate, phosphorodithioate, bridged phosphorothioate or sulfone linkages, and combinations of such linkages. The term nucleic acid also specifically includes nucleic acids composed of bases other than the five biologically occurring bases (adenine, guanine, thymine, cytosine and uracil). The term “nucleic acid” typically refers to large polynucleotides.

[0066] Conventional notation is used herein to describe polynucleotide sequences: the left-hand end of a single-stranded polynucleotide sequence is the 5′-end; the left-hand direction of a double-stranded polynucleotide sequence is referred to as the 5′-direction.

[0067] The direction of 5′ to 3′ addition of nucleotides to nascent RNA transcripts is referred to as the transcription direction. The DNA strand having the same sequence as an mRNA is referred to as the “coding strand”; sequences on the DNA strand which are located 5′ to a reference point on the DNA are referred to as “upstream sequences”; sequences on the DNA strand which are 3′ to a reference point on the DNA are referred to as “downstream sequences.”

[0068] In the context of the present invention, the following abbreviations for the commonly occurring nucleic acid bases are used. “A” refers to adenosine, “C” refers to cytosine, “G” refers to guanosine, “T” refers to thymidine, and “U” refers to uridine.

[0069] As used herein, the terms “peptide,” “polypeptide,” and “protein” are used interchangeably, and refer to a compound comprised of amino acid residues covalently linked by peptide bonds. A protein or peptide must contain at least two amino acids, and no limitation is placed on the maximum number of amino acids that can comprise a protein's or peptide's sequence. Polypeptides include any peptide or protein comprising two or more amino acids joined to each other by peptide bonds. As used herein, the term refers to both short chains, which also commonly are referred to in the art as peptides, oligopeptides and oligomers, for example, and to longer chains, which generally are referred to in the art as proteins, of which there are many types. “Polypeptides” include, for example, biologically active fragments, substantially homologous polypeptides, oligopeptides, homodimers, heterodimers, variants of polypeptides, modified polypeptides, derivatives, analogs, fusion proteins, among others. The polypeptides include natural peptides, recombinant peptides, synthetic peptides, or a combination thereof.

[0070] The term “RNA” as used herein is defined as ribonucleic acid.

[0071] “Variant” as the term is used herein, is a nucleic acid sequence or a peptide sequence that differs in sequence from a reference nucleic acid sequence or peptide sequence respectively, but retains essential biological properties of the reference molecule. Changes in the sequence of a nucleic acid variant may not alter the amino acid sequence of a peptide encoded by the reference nucleic acid, or may result in amino acid substitutions, additions, deletions, fusions and truncations. Changes in the sequence of peptide variants are typically limited or conservative, so that the sequences of the reference peptide and the variant are closely similar overall and, in many regions, identical. A variant and reference peptide can differ in amino acid sequence by one or more substitutions, additions, deletions in any combination. A variant of a nucleic acid or peptide can be a naturally occurring such as an allelic variant, or can be a variant that is not known to occur naturally. Non-naturally occurring variants of nucleic acids and peptides may be made by mutagenesis techniques or by direct synthesis.

[0072] A “vector” is a composition of matter which comprises an isolated nucleic acid and which can be used to deliver the isolated nucleic acid to the interior of a cell. Numerous vectors are known in the art including, but not limited to, linear polynucleotides, polynucleotides associated with ionic or amphiphilic compounds, plasmids, and viruses. Thus, the term “vector” includes an autonomously replicating plasmid or a virus. The term should also be construed to include non-plasmid and non-viral compounds which facilitate transfer of nucleic acid into cells, such as, for example, polylysine compounds, liposomes, and the like. Examples of viral vectors include, but are not limited to, adenoviral vectors, adeno-associated virus vectors, retroviral vectors, and the like.

[0073] Ranges: throughout this disclosure, various aspects of the invention can be presented in a range format. It should be understood that the description in range format is merely for convenience and brevity and should not be construed as an inflexible limitation on the scope of the invention. Accordingly, the description of a range should be considered to have specifically disclosed all the possible subranges as well as individual numerical values within that range. For example, description of a range such as from 1 to 6 should be considered to have specifically disclosed subranges such as from 1 to 3, from 1 to 4, from 1 to 5, from 2 to 4, from 2 to 6, from 3 to 6 etc., as well as individual numbers within that range, for example, 1, 2, 2.7, 3, 4, 5, 5.3, and 6. This applies regardless of the breadth of the range.

### Proteins

[0074] In one aspect, the present disclosure is based on the development of novel editing proteins which provide targeted viral RNA cleavage. In some embodiment, the proteins comprise a localization signal. In one embodiment, the localization signal localizes the protein to the site in which a target RNA is located. In one embodiment, the protein comprises a nuclear localization signal (NLS), to target RNA in the nucleus. In one embodiment, the protein comprises an nuclear export signal (NES), to target RNA in the cytoplasm. In one embodiment, the fusion protein comprises a purification and/or detection tag.

[0075] In one aspect, the present disclosure is based on the development of novel editing proteins which provide targeted viral RNA cleavage and are effectively delivered. In some embodiment, the proteins comprise a localization signal. In one embodiment, the localization signal localizes the protein to the site in which a target RNA is located. In one embodiment, the protein comprises a purification and/or detection tag. In one embodiment, the protein comprises a purification and/or detection tag.

### Editing Protein

[0076] In one embodiment, the editing protein includes, but is not limited to, a CRISPR-associated (Cas) protein, a zinc finger nuclease (ZFN) protein, and a protein having a DNA or RNA binding domain.

[0077] Non-limiting examples of Cas proteins include Cas1, Cas1B, Cas2, Cas3, Cas4, Cas5, Cas6, Cas7, Cas8, Cas9, Cas10, Csy1, Csy2, Csy3, Cse1, Cse2, Csc1, Csc2, Csa5, Csn2. Csm2, Csm3, Csm4, Csm5, Csm6, Cmr1, Cmr3, Cmr4, Cmr5, Cmr6, Csb1, Csb2, Csb3, Csx17, Csx14, Csx10, Csx16, CsaX, Csx3, Csx1, Csx15, Csf1, Csf2, Csf3, Csf4, SpCas9, StCas9, NmCas9, SaCas9, CjCas9, CjCas9, AsCpf1, LbCpf1, FnCpf1, VRER SpCas9, VQR SpCas9, xCas9 3.7, homologs thereof, orthologs thereof, or modified versions thereof. In some embodiments, the Cas protein has DNA or RNA cleavage activity. In some embodiments, the Cas protein directs cleavage of one or both strands of a nucleic acid molecule at the location of a target sequence, such as within the target sequence and/or within the complement of the target sequence. In some embodiments, the Cas protein directs cleavage of one or both strands within about 1, 2, 3, 4, 5, 6, 7, 8, 9, 10, 15, 20, 25, 50, 100, 200, 500, or more base pairs from the first or last nucleotide of a target sequence. In one embodiment, the Cas protein is Cas9, Cas13, or Cpf1. In one embodiment, Cas protein is catalytically deficient (dCas).

[0078] In one embodiment, the Cas protein has RNA binding activity. In one embodiment, Cas protein is Cas13. In one embodiment, the Cas protein is PspCas13b, PspCas13b Truncation, AdmCas13d, AspCas13b, AspCas13c, BmaCas13a, BzoCas13b, CamCas13a, CcaCas13b, Cga2Cas13a, CgaCas13a, EbaCas13a, EreCas13a, EsCas13d, FbrCas13b, FnbCas13c, FndCas13c, FnfCas13c, FnsCas13c, FpeCas13c, FulCas13c, HheCas13a, LbfCas13a, LbmCas13a, LbnCas13a, LbuCas13a, LseCas13a, LshCas13a, LspCas13a, Lwa2cas13a, LwaCas13a, LweCas13a, PauCas13b, PbuCas13b, PgiCas13b, PguCas13b, Pin2Cas13b, Pin3Cas13b, PinCas13b, Pprcas13a, PsaCas13b, PsmCas13b, RaCas13d, RanCas13b, RcdCas13a, RcrCas13a, RcsCas13a, RfxCas13d, UrCas13d, dPspCas13b, PspCas13b_A133H, PspCas13b_A1058H, dPspCas13b truncation, dAdmCas13d, dAspCas13b, dAspCas13c, dBmaCas13a, dBzoCas13b, dCamCas13a, dCcaCas13b, dCga2Cas13a, dCgaCas13a, dEbaCas13a, dEreCas13a, dEsCas13d, dFbrCas13b, dFnbCas13c, dFndCas13c, dFnfCas13c, dFnsCas13c, dFpeCas13c, dFulCas13c, dHheCas13a, dLbfCas13a, dLbmCas13a, dLbnCas13a, dLbuCas13a, dLseCas13a, dLshCas13a, dLspCas13a, dLwa2cas13a, dLwaCas13a, dLweCas13a, dPauCas13b, dPbuCas13b, dPgiCas13b, dPguCas13b, dPin2Cas13b, dPin3Cas13b, dPinCas13b, dPprCas13a, dPsaCas13b, dPsmCas13b, dRaCas13d, dRanCas13b, dRcdCas13a, dRcrCas13a, dRcsCas13a, dRfxCas13d, or dUrCas13d. Additional Cas proteins are known in the art (e.g., Konermann et al., Cell, 2018, 173:665-676 e14, Yan et al., Mol Cell, 2018, 7:327-339 e5; Cox, D. B. T., et al., Science, 2017, 358: 1019-1027; Abudayyeh et al., Nature, 2017, 550: 280-284, Gootenberg et al., Science, 2017, 356: 438-442; and East-Seletsky et al., Mol Cell, 2017, 66: 373-383 e3, which are herein incorporated by reference).

[0079] In one embodiment, the Cas protein comprises a sequence at least 70%, at least 71%, at least 72%, at least 73%, at least 74%, at least 75%, at least 76%, at least 77%, at least 78%, at least 79%, at least 80%, at least 81%, at least 82%, at least 83%, at least 84%, at least 85%, at least 86%, at least 87%, at least 88%, at least 89%, at least 90%, at least 91%, at least 92%, at least 93%, at least 94%, at least 95%, at least 96%, at least 97%, at least 98%, or at least 99% identical to one of SEQ ID NOs:1-49. In one embodiment, the Cas protein comprises a sequence at least 70%, at least 71%, at least 72%, at least 73%, at least 74%, at least 75%, at least 76%, at least 77%, at least 78%, at least 79%, at least 80%, at least 81%, at least 82%, at least 83%, at least 84%, at least 85%, at least 86%, at least 87%, at least 88%, at least 89%, at least 90%, at least 91%, at least 92%, at least 93%, at least 94%, at least 95%, at least 96%, at least 97%, at least 98%, or at least 99% identical to one of SEQ ID NOs: 1-47. In one embodiment, the Cas protein comprises a sequence of one of SEQ ID NOs:1-49. In one embodiment, the Cas protein comprises a sequence of one of SEQ ID NOs:1-47.

### Localization Signal

[0080] In some embodiments, the protein may contain a localization signal, such as an nuclear localization signal (NLS), nuclear export signal (NES) or other localization signals to localize to organelles, such as mitochondria, or to localize in the cytoplasm. In one embodiment, the localization signal localizes the protein to the site in which a target RNA is located.

### Nuclear Localization Signal

[0081] In one embodiment, the protein comprises a NLS. In one embodiment, the NLS is a retrotransposon NLS. In one embodiment, the NLS is derived from Ty1, yeast GAL4, SKI3, L29 or histone H2B proteins, polyoma virus large T protein, VP1 or VP2 capsid protein, SV40 VP1 or VP2 capsid protein, Adenovirus Ela or DBP protein, influenza virus NS1 protein, hepatitis vims core antigen or the mammalian lamin, c-myc, max, c-myb, p53, c-erbA, jun, Tax, steroid receptor or Mx proteins, Nucleoplasmin (NPM2), Nucleophosmin (NPM1), or simian vims 40 (“SV40”) T-antigen. In one embodiment, the NLS is a Ty1 or Ty1-derived NLS, a Ty2 or Ty2-derived NLS or a MAK11 or MAK11-derived NLS. In one embodiment, the Ty1 NLS comprises an amino acid sequence of SEQ ID NO:50. In one embodiment, the Ty2 NLS comprises an amino acid sequence of SEQ ID NO:51. In one embodiment, the MAK11 NLS comprises an amino acid sequence of SEQ ID NO:52. In one embodiment, the NLS comprises a sequence at least 70%, at least 71%, at least 72%, at least 73%, at least 74%, at least 75%, at least 76%, at least 77%, at least 78%, at least 79%, at least 80%, at least 81%, at least 82%, at least 83%, at least 84%, at least 85%, at least 86%, at least 87%, at least 88%, at least 89%, at least 90%, at least 91%, at least 92%, at least 93%, at least 94%, at least 95%, at least 96%, at least 97%, at least 98%, or at least 99% identical to one of SEQ ID NOs: 50-57 and 298-910. In one embodiment, the NLS comprises a sequence of one of SEQ ID NOs: 50-57 and 298-910.

[0082] In one embodiment, the NLS is a Ty1-like NLS. For example, in one embodiment, the Ty1-like NLS comprises KKRX motif. In one embodiment, the Ty1-like NLS comprises KKRX motif at the N-terminal end. In one embodiment, the Ty1-like NLS comprises KKR motif. In one embodiment, the Ty1-like NLS comprises KKR motif at the C-terminal end. In one embodiment, the Ty1-like NLS comprises a KKRX and a KKR motif. In one embodiment, the Ty1-like NLS comprises a KKRX at the N-terminal end and a KKR motif at the C-terminal end. In one embodiment, the Ty1-like NLS comprises at least 20 amino acids. In one embodiment, the Ty1-like NLS comprises between 20 and 40 amino acids. In one embodiment, the Ty1-like NLS comprises a sequence at least 70%, at least 71%, at least 72%, at least 73%, at least 74%, at least 75%, at least 76%, at least 77%, at least 78%, at least 79%, at least 80%, at least 81%, at least 82%, at least 83%, at least 84%, at least 85%, at least 86%, at least 87%, at least 88%, at least 89%, at least 90%, at least 91%, at least 92%, at least 93%, at least 94%, at least 95%, at least 96%, at least 97%, at least 98%, or at least 99% identical to one of SEQ ID NOs: 298-910. In one embodiment, the NLS comprises a sequence of one of SEQ ID NOs: 298-910, wherein the sequence comprises one or more, two or more, three or more, four or more, five or more, six or more, seven or more, eight or more, nine or more, or ten or more, insertions, deletions or substitutions. In one embodiment, the Ty1-like NLS comprises a sequence of one of SEQ ID NOs: 298-910.

[0083] In one embodiment, the NLS comprises two copies of the same NLS. For example, in one embodiment, the NLS comprises a multimer of a first Ty1-derived NLS and a second Ty1-derived NLS.

### Nuclear Export Signal

[0084] In one embodiment, the protein comprises a Nuclear Export Signal (NES). In one embodiment, the NES is attached to the N-terminal end of the Cas protein. In one embodiment, the NES localizes the protein to the cytoplasm for targeting cytoplasmic RNA. In one embodiment, the NES comprises an amino acid sequence at least 70%, at least 71%, at least 72%, at least 73%, at least 74%, at least 75%, at least 76%, at least 77%, at least 78%, at least 79%, at least 80%, at least 81%, at least 82%, at least 83%, at least 84%, at least 85%, at least 86%, at least 87%, at least 88%, at least 89%, at least 90%, at least 91%, at least 92%, at least 93%, at least 94%, at least 95%, at least 96%, at least 97%, at least 98%, or at least 99% identical to SEQ ID NOs:58 or 59. In one embodiment, the NES comprises an amino acid sequence of SEQ ID NOs: 58 or 59.

### Organelle Localization Signal

[0085] In one embodiment, the protein comprises a localization signal that localizes the protein to an organelle. In one embodiment, the localization signal localizes the protein to the nucleolus, ribosome, vesicle, rough endoplasmic reticulum, Golgi apparatus, cytoskeleton, smooth endoplasmic reticulum, mitochondria, vacuole, cytosol, lysosome, or centriole. A number of localization signals are known in the art.

[0086] In one embodiment, the protein comprises a localization signal that localizes the protein to an organelle or extracellularly. In one embodiment, the localization signal localizes the protein to the nucleolus, ribosome, vesicle, rough endoplasmic reticulum, Golgi apparatus, cytoskeleton, smooth endoplasmic reticulum, mitochondria, vacuole, cytosol, lysosome, or centriole.

[0087] A number of localization signals are known in the art. Exemplary localization signals include, but are not limited to 1× mitochondrial targeting sequence, 4× mitochondrial targeting sequence, secretory signal sequence (IL-2), myristylation, Calsequestrin leader, KDEL retention and peroxisome targeting sequence.

[0088] In one embodiment, the localization signal comprises sequence at least 70%, at least 71%, at least 72%, at least 73%, at least 74%, at least 75%, at least 76%, at least 77%, at least 78%, at least 79%, at least 80%, at least 81%, at least 82%, at least 83%, at least 84%, at least 85%, at least 86%, at least 87%, at least 88%, at least 89%, at least 90%, at least 91%, at least 92%, at least 93%, at least 94%, at least 95%, at least 96%, at least 97%, at least 98%, or at least 99% identical to SEQ ID NOs:60-66. In one embodiment, the localization signal comprises sequence of SEQ ID NOs: 60-66.

Purification and/or Detection Tag

[0089] In some embodiments, the protein may contain a purification and/or detection tag. In one embodiment, the tag is on the N-terminal end of the protein. In one embodiment, the tag is a 3×FLAG tag. In one embodiment, the tag comprises an amino acid sequence at least 70%, at least 71%, at least 72%, at least 73%, at least 74%, at least 75%, at least 76%, at least 77%, at least 78%, at least 79%, at least 80%, at least 81%, at least 82%, at least 83%, at least 84%, at least 85%, at least 86%, at least 87%, at least 88%, at least 89%, at least 90%, at least 91%, at least 92%, at least 93%, at least 94%, at least 95%, at least 96%, at least 97%, at least 98%, or at least 99% identical to SEQ ID NO:67. In one embodiment, the tag comprises an amino acid sequence of SEQ ID NO:67.

### Fusion Proteins

[0090] In one embodiment, the proteins of the disclosure are effectively delivered to the nucleus, an organelle, the cytoplasm or extracellularly and allow for targeted viral RNA cleavage. In one embodiment, the protein comprises an amino acid sequence 70%, at least 71%, at least 72%, at least 73%, at least 74%, at least 75%, at least 76%, at least 77%, at least 78%, at least 79%, at least 80%, at least 81%, at least 82%, at least 83%, at least 84%, at least 85%, at least 86%, at least 87%, at least 88%, at least 89%, at least 90%, at least 91%, at least 92%, at least 93%, at least 94%, at least 95%, at least 96%, at least 97%, at least 98%, or at least 99% identical to one of SEQ ID NOs:68-100. In one embodiment, the protein comprises an amino acid sequence of one of SEQ ID NOs: 68-100.

### Proteins, Peptides and Fusion Proteins

[0091] The proteins of the present disclosure may be made using chemical methods. For example, protein can be synthesized by solid phase techniques (Roberge J Y et al (1995) Science 269: 202-204), cleaved from the resin, and purified by preparative high-performance liquid chromatography. Automated synthesis may be achieved, for example, using the ABI 431 A Peptide Synthesizer (Perkin Elmer) in accordance with the instructions provided by the manufacturer.

[0092] The proteins of the present disclosure may be made using recombinant protein expression. The recombinant expression vectors of the disclosure comprise a nucleic acid of the invention in a form suitable for expression of the nucleic acid in a host cell, which means that the recombinant expression vectors include one or more regulatory sequences, selected on the basis of the host cells to be used for expression, that is operatively-linked to the nucleic acid sequence to be expressed. Within a recombinant expression vector, “operably-linked” is intended to mean that the nucleotide sequence of interest is linked to the regulatory sequences in a manner that allows for expression of the nucleotide sequence (e.g., in an in vitro transcription/translation system or in a host cell when the vector is introduced into the host cell).

[0093] The term “regulatory sequence” is intended to include promoters, enhancers and other expression control elements (e.g., polyadenylation signals). Such regulatory sequences are described, for example, in Goeddel, Gene Expression Technology: Methods in Enzymology 185, Academic Press, San Diego, Calif. (1990). Regulatory sequences include those that direct constitutive expression of a nucleotide sequence in many types of host cell and those that direct expression of the nucleotide sequence only in certain host cells (e.g., tissue-specific regulatory sequences). It will be appreciated by those skilled in the art that the design of the expression vector can depend on such factors as the choice of the host cell to be transformed, the level of expression of protein desired, etc. The expression vectors of the invention can be introduced into host cells to thereby produce proteins or peptides, including fusion proteins or peptides, encoded by nucleic acids as described herein.

[0094] The recombinant expression vectors of the invention can be designed for production of variant proteins in prokaryotic or eukaryotic cells. For example, proteins of the invention can be expressed in bacterial cells such as Escherichia coli, insect cells (using baculovirus expression vectors) yeast cells or mammalian cells. Suitable host cells are discussed further in Goeddel, Gene Expression Technology: Methods in Enzymology 185, Academic Press, San Diego, Calif (1990). Alternatively, the recombinant expression vector can be transcribed and translated in vitro, for example using T7 promoter regulatory sequences and T7 polymerase.

[0095] Expression of proteins in prokaryotes is most often carried out in Escherichia coli with vectors containing constitutive or inducible promoters directing the expression of either fusion or non-fusion proteins. Fusion vectors add a number of amino acids to a protein encoded therein, to the amino or C terminus of the recombinant protein. Such fusion vectors typically serve three purposes: (i) to increase expression of recombinant protein; (ii) to increase the solubility of the recombinant protein; and (iii) to aid in the purification of the recombinant protein by acting as a ligand in affinity purification. Often, in fusion expression vectors, a proteolytic cleavage site is introduced at the junction of the fusion moiety and the recombinant protein to enable separation of the recombinant protein from the fusion moiety subsequent to purification of the fusion protein. Such enzymes, and their cognate recognition sequences, include Factor Xa, thrombin, PreScission, TEV and enterokinase. Typical fusion expression vectors include pGEX (Pharmacia Biotech Inc; Smith and Johnson, 1988. Gene 67: 31-40), pMAL (New England Biolabs, Beverly, Mass.) and pRITS (Pharmacia, Piscataway, N.J.) that fuse glutathione S-transferase (GST), maltose E binding protein, or protein A, respectively, to the target recombinant protein.

[0096] Examples of suitable inducible non-fusion E. coli expression vectors include pTrc (Amrann et al., (1988) Gene 69:301-315) and pET I1d (Studier et al., Gene Expression Technology: Methods in Enzymology 185, Academic Press, San Diego, Calif (1990) 60-89)—not accurate, pET11a-d have N terminal T7 tag.

[0097] One strategy to maximize recombinant protein expression in E. coli is to express the protein in a host bacterium with an impaired capacity to proteolytically cleave the recombinant protein. See, e.g., Gottesman, Gene Expression Technology: Methods in Enzymology 185, Academic Press, San Diego, Calif. (1990) 119-128. Another strategy is to alter the nucleic acid sequence of the nucleic acid to be inserted into an expression vector so that the individual codons for each amino acid are those preferentially utilized in E. coli (see, e.g., Wada, et al., 1992. Nucl. Acids Res. 20: 2111-2118). Such alteration of nucleic acid sequences of the invention can be carried out by standard DNA synthesis techniques. Another strategy to solve codon bias is by using BL21-codon plus bacterial strains (Invitrogen) or Rosetta bacterial strain (Novagen), these strains contain extra copies of rare E. coli tRNA genes.

[0098] In another embodiment, the expression vector encoding for the protein of the disclosure is a yeast expression vector. Examples of vectors for expression in yeast Saccharomyces cerevisiae include pYepSec1 (Baldari, et al., 1987. EMBO J. 6: 229-234), pMFa (Kurjan and Herskowitz, 1982. Cell 30: 933-943), pJRY88 (Schultz et al., 1987. Gene 54: 113-123), pYES2 (Invitrogen Corporation, San Diego, Calif.), and picZ (InVitrogen Corp, San Diego, Calif).

[0099] Alternatively, polypeptides of the present invention can be produced in insect cells using baculovirus expression vectors. Baculovirus vectors available for expression of proteins in cultured insect cells (e.g., SF9 cells) include the pAc series (Smith, et al., 1983. Mol. Cell. Biol. 3: 2156-2165) and the pVL series (Lucklow and Summers, 1989. Virology 170: 31-39).

[0100] In yet another embodiment, a nucleic acid of the disclosure is expressed in mammalian cells using a mammalian expression vector. Mammalian cell lines available in the art for expression of a heterologous polypeptide include, but are not limited to, Chinese hamster ovary (CHO) cells, HeLa cells, baby hamster kidney cells, NSO mouse melanoma cells, YB2/0 rat myeloma cells, human embryonic kidney cells, human embryonic retina cells and many others. Examples of mammalian expression vectors include pCDM8 (Seed, 1987. Nature 329: 840) and pMT2PC (Kaufman, et al., 1987. EMBO J. 6: 187-195), pIRESpuro (Clontech), pUB6 (Invitrogen), pCEP4 (Invitrogen) pREP4 (Invitrogen), pcDNA3 (Invitrogen). When used in mammalian cells, the expression vector's control functions are often provided by viral regulatory elements. For example, commonly used promoters are derived from polyoma, adenovirus 2, cytomegalovirus, Rous Sarcoma Virus, and simian virus 40. For other suitable expression systems for both prokaryotic and eukaryotic cells see, e.g., Chapters 16 and 17 of Sambrook, et al., Molecular Cloning: A Laboratory Manual. 2nd ed., Cold Spring Harbor Laboratory, Cold Spring Harbor Laboratory Press, Cold Spring Harbor, N.Y., 1989.

[0101] In another embodiment, the recombinant mammalian expression vector is capable of directing expression of the nucleic acid preferentially in a particular cell type (e.g., tissue-specific regulatory elements are used to express the nucleic acid). Tissue-specific regulatory elements are known in the art. Non-limiting examples of suitable tissue-specific promoters include the albumin promoter (liver-specific; Pinkert, et al., 1987. Genes Dev. 1: 268-277), lymphoid-specific promoters (Calame and Eaton, 1988. Adv. Immunol. 43: 235-275), in particular promoters of T cell receptors (Winoto and Baltimore, 1989. EMBO J. 8: 729-733) and immunoglobulins (Banerji, et al., 1983. Cell 33: 729-740; Queen and Baltimore, 1983. Cell 33: 741-748), neuron-specific promoters (e.g., the neurofilament promoter; Byrne and Ruddle, 1989. Proc. Natl. Acad. Sci. USA 86: 5473-5477), pancreas-specific promoters (Edlund, et al., 1985. Science 230: 912-916), and mammary gland-specific promoters (e.g., milk whey promoter; U.S. Pat. No. 4,873,316 and European Application Publication No. 264,166). Developmentally-regulated promoters are also encompassed, e.g., the murinehox promoters (Kessel and Gruss, 1990. Science 249: 374-379) and the alpha-fetoprotein promoter (Campes and Tilghman, 1989. Genes Dev. 3: 537-546).

[0102] The invention should also be construed to include any form of a protein having substantial homology to a protein disclosed herein. In one embodiment, a protein which is “substantially homologous” is about 50% homologous, about 70% homologous, about 80% homologous, about 90% homologous, about 91% homologous, about 92% homologous, about 93% homologous, about 94% homologous, about 95% homologous, about 96% homologous, about 97% homologous, about 98% homologous, or about 99% homologous to amino acid sequence of a fusion-protein disclosed herein.

[0103] The protein may alternatively be made by recombinant means or by cleavage from a longer polypeptide. The composition of a protein may be confirmed by amino acid analysis or sequencing.

[0104] The variants of the protein according to the present invention may be (i) one in which one or more of the amino acid residues are substituted with a conserved or non-conserved amino acid residue and such substituted amino acid residue may or may not be one encoded by the genetic code, (ii) one in which there are one or more modified amino acid residues, e.g., residues that are modified by the attachment of substituent groups, (iii) one in which the peptide is an alternative splice variant of the protein of the present invention, (iv) fragments of the peptides and/or (v) one in which the protein is fused with another peptide, such as a leader or secretory sequence or a sequence which is employed for purification (for example, His-tag) or for detection (for example, Sv5 epitope tag). The fragments include peptides generated via proteolytic cleavage (including multi-site proteolysis) of an original sequence. Variants may be post-translationally, or chemically modified. Such variants are deemed to be within the scope of those skilled in the art from the teaching herein.

[0105] As known in the art the “similarity” between two fusion proteins is determined by comparing the amino acid sequence and its conserved amino acid substitutes of one polypeptide to a sequence of a second polypeptide. Variants are defined to include peptide sequences different from the original sequence. In one embodiment, variants are different from the original sequence in less than 40% of residues per segment of interest different from the original sequence in less than 25% of residues per segment of interest, different by less than 10% of residues per segment of interest, or different from the original protein sequence in just a few residues per segment of interest and at the same time sufficiently homologous to the original sequence to preserve the functionality of the original sequence and/or the ability to stimulate the differentiation of a stem cell into the osteoblast lineage. The present invention includes amino acid sequences that are at least 60%, 65%, 70%, 72%, 74%, 76%, 78%, 80%, 90%, 91%, 92%, 93%, 94%, 95%, 96%, 97%, 98%, or 99% similar or identical to the original amino acid sequence. The degree of identity between two peptides is determined using computer algorithms and methods that are widely known for the persons skilled in the art. The identity between two amino acid sequences may be determined by using the BLASTP algorithm [BLAST Manual, Altschul, S., et al., NCBI NLM NIH Bethesda, Md. 20894, Altschul, S., et al., J. Mol. Biol. 215: 403-410 (1990)].

[0106] The protein of the disclosure can be post-translationally modified. For example, post-translational modifications that fall within the scope of the present invention include signal peptide cleavage, glycosylation, acetylation, isoprenylation, proteolysis, myristoylation, protein folding and proteolytic processing, etc. Some modifications or processing events require introduction of additional biological machinery. For example, processing events, such as signal peptide cleavage and core glycosylation, are examined by adding canine microsomal membranes or Xenopus egg extracts (U.S. Pat. No. 6,103,489) to a standard translation reaction.

[0107] The protein of the disclosure may include unnatural amino acids formed by post-translational modification or by introducing unnatural amino acids during translation. A variety of approaches are available for introducing unnatural amino acids during protein translation.

[0108] A protein of the disclosure may be phosphorylated using conventional methods such as the method described in Reedijk et al. (The EMBO Journal 11(4):1365, 1992).

[0109] Cyclic derivatives of the fusion proteins of the invention are also part of the present invention. Cyclization may allow the protein to assume a more favorable conformation for association with other molecules. Cyclization may be achieved using techniques known in the art. For example, disulfide bonds may be formed between two appropriately spaced components having free sulfhydryl groups, or an amide bond may be formed between an amino group of one component and a carboxyl group of another component. Cyclization may also be achieved using an azobenzene-containing amino acid as described by Ulysse, L., et al., J. Am. Chem. Soc. 1995, 117, 8466-8467. The components that form the bonds may be side chains of amino acids, non-amino acid components or a combination of the two. In an embodiment of the invention, cyclic peptides may comprise a beta-turn in the right position. Beta-turns may be introduced into the peptides of the invention by adding the amino acids Pro-Gly at the right position.

[0110] It may be desirable to produce a cyclic protein which is more flexible than the cyclic peptides containing peptide bond linkages as described above. A more flexible peptide may be prepared by introducing cysteines at the right and left position of the peptide and forming a disulfide bridge between the two cysteines. The two cysteines are arranged so as not to deform the beta-sheet and turn. The peptide is more flexible as a result of the length of the disulfide linkage and the smaller number of hydrogen bonds in the beta-sheet portion. The relative flexibility of a cyclic peptide can be determined by molecular dynamics simulations.

[0111] The invention also relates to peptides comprising a fusion protein comprising Cas13 and a RNase protein, wherein the fusion protein is itself fused to, or integrated into, a target protein, and/or a targeting domain capable of directing the chimeric protein to a desired cellular component or cell type or tissue. The chimeric proteins may also contain additional amino acid sequences or domains. The chimeric proteins are recombinant in the sense that the various components are from different sources, and as such are not found together in nature (i.e., are heterologous).

[0112] In one embodiment, the targeting domain can be a membrane spanning domain, a membrane binding domain, or a sequence directing the protein to associate with for example vesicles or with the nucleus. In one embodiment, the targeting domain can target a peptide to a particular cell type or tissue. For example, the targeting domain can be a cell surface ligand or an antibody against cell surface antigens of a target tissue. A targeting domain may target the peptide of the invention to a cellular component.

[0113] A peptide of the invention may be synthesized by conventional techniques. For example, the peptides or chimeric proteins may be synthesized by chemical synthesis using solid phase peptide synthesis. These methods employ either solid or solution phase synthesis methods (see for example, J. M. Stewart, and J. D. Young, Solid Phase Peptide Synthesis, 2^{nd} Ed., Pierce Chemical Co., Rockford Ill. (1984) and G. Barany and R. B. Merrifield, The Peptides: Analysis Synthesis, Biology editors E. Gross and J. Meienhofer Vol. 2 Academic Press, New York, 1980, pp. 3-254 for solid phase synthesis techniques; and M Bodansky, Principles of Peptide Synthesis, Springer-Verlag, Berlin 1984, and E. Gross and J. Meienhofer, Eds., The Peptides: Analysis, Synthesis, Biology, suprs, Vol 1, for classical solution synthesis). By way of example, a peptide of the invention may be synthesized using 9-fluorenyl methoxycarbonyl (Fmoc) solid phase chemistry with direct incorporation of phosphothreonine as the N-fluorenylmethoxy-carbonyl-O-benzyl-L-phosphothreonine derivative.

[0114] N-terminal or C-terminal fusion proteins comprising a peptide or chimeric protein of the invention conjugated with other molecules may be prepared by fusing, through recombinant techniques, the N-terminal or C-terminal of the peptide or chimeric protein, and the sequence of a selected protein or selectable marker with a desired biological function. The resultant fusion proteins contain the protein fused to the selected protein or marker protein as described herein. Examples of proteins which may be used to prepare fusion proteins include immunoglobulins, glutathione-S-transferase (GST), hemagglutinin (HA), and truncated myc.

[0115] Peptides of the invention may be developed using a biological expression system. The use of these systems allows the production of large libraries of random peptide sequences and the screening of these libraries for peptide sequences that bind to particular proteins. Libraries may be produced by cloning synthetic DNA that encodes random peptide sequences into appropriate expression vectors (see Christian et al 1992, J. Mol. Biol. 227:711; Devlin et al, 1990 Science 249:404; Cwirla et al 1990, Proc. Natl. Acad, Sci. USA, 87:6378). Libraries may also be constructed by concurrent synthesis of overlapping peptides (see U.S. Pat. No. 4,708,871).

[0116] The peptides and chimeric proteins of the invention may be converted into pharmaceutical salts by reacting with inorganic acids such as hydrochloric acid, sulfuric acid, hydrobromic acid, phosphoric acid, etc., or organic acids such as formic acid, acetic acid, propionic acid, glycolic acid, lactic acid, pyruvic acid, oxalic acid, succinic acid, malic acid, tartaric acid, citric acid, benzoic acid, salicylic acid, benzenesulfonic acid, and toluenesulfonic acids.

### Nucleic Acids

[0117] In one aspect, the present disclosure novel nucleic acid molecules encoding editing proteins which provide targeted viral RNA cleavage. In some embodiment, the nucleic acid molecule comprises a nucleic acid sequence encoding a localization signal. In one embodiment, the localization signal localizes the protein to the site in which a target RNA is located. In one embodiment, the nucleic acid molecule comprises a nucleic acid sequence encoding a nuclear localization signal (NLS), to target RNA in the nucleus. In one embodiment, the nucleic acid molecule comprises a nucleic acid sequence encoding a nuclear export signal (NES), to target RNA in the cytoplasm. Other localization signals can be used (and which are known in the art) to target RNA in organelles, such as mitochondria. In other embodiments, the nucleic acid molecule does not comprise a nucleic acid sequence encoding an localization signal, to target RNA in the cytoplasm. In one embodiment, the nucleic acid molecule comprises a nucleic acid sequence encoding a purification and/or detection tag.

[0118] The present disclosure also provides targeting nucleic acids, including CRISPR RNAs (crRNAs), for targeting the protein of the disclosure to a target RNA.

[0119] In one aspect, the present disclosure novel nucleic acid molecules encoding editing proteins which provide targeted viral RNA cleavage. In some embodiment, the nucleic acid molecule comprises a nucleic acid sequence encoding a localization signal. In one embodiment, the localization signal localizes the protein to the site in which a target RNA is located. Thus, the disclosure provides nucleic acid molecules encoding proteins for targeted viral RNA cleavage which are capable of localization.

### Editing Protein

[0120] In one embodiment, the nucleic acid molecule comprises a sequence nucleic acid encoding an editing protein. In one embodiment, the editing protein includes, but is not limited to, a CRISPR-associated (Cas) protein, a zinc finger nuclease (ZFN) protein, and a protein having a DNA or RNA binding domain.

[0121] Non-limiting examples of Cas proteins include Cas1, Cas1B, Cas2, Cas3, Cas4, Cas5, Cas6, Cas7, Cas8, Cas9, Cas10, Csy1, Csy2, Csy3, Cse1, Cse2, Csc1, Csc2, Csa5, Csn2. Csm2, Csm3, Csm4, Csm5, Csm6, Cmr1, Cmr3, Cmr4, Cmr5, Cmr6, Csb1, Csb2, Csb3, Csx17, Csx14, Csx10, Csx16, CsaX, Csx3, Csx1, Csx15, Csf1, Csf2, Csf3, Csf4, SpCas9, StCas9, NmCas9, SaCas9, CjCas9, CjCas9, AsCpf1, LbCpf1, FnCpf1, VRER SpCas9, VQR SpCas9, xCas9 3.7, homologs thereof, orthologs thereof, or modified versions thereof. In some embodiments, the Cas protein has DNA or RNA cleavage activity. In some embodiments, the Cas protein directs cleavage of one or both strands of a nucleic acid molecule at the location of a target sequence, such as within the target sequence and/or within the complement of the target sequence. In some embodiments, the Cas protein directs cleavage of one or both strands within about 1, 2, 3, 4, 5, 6, 7, 8, 9, 10, 15, 20, 25, 50, 100, 200, 500, or more base pairs from the first or last nucleotide of a target sequence. In one embodiment, the Cas protein is Cas9, Cas13, or Cpf1. In one embodiment, Cas protein is catalytically deficient (dCas).

[0122] In one embodiment, the Cas protein has RNA binding activity. In one embodiment, Cas protein is Cas13. In one embodiment, the Cas protein is PspCas13b, PspCas13b Truncation, AdmCas13d, AspCas13b, AspCas13c, BmaCas13a, BzoCas13b, CamCas13a, CcaCas13b, Cga2Cas13a, CgaCas13a, EbaCas13a, EreCas13a, EsCas13d, FbrCas13b, FnbCas13c, FndCas13c, FnfCas13c, FnsCas13c, FpeCas13c, FulCas13c, HheCas13a, LbfCas13a, LbmCas13a, LbnCas13a, LbuCas13a, LseCas13a, LshCas13a, LspCas13a, Lwa2cas13a, LwaCas13a, LweCas13a, PauCas13b, PbuCas13b, PgiCas13b, PguCas13b, Pin2Cas13b, Pin3Cas13b, PinCas13b, Pprcas13a, PsaCas13b, PsmCas13b, RaCas13d, RanCas13b, RcdCas13a, RcrCas13a, RcsCas13a, RfxCas13d, UrCas13d, dPspCas13b, PspCas13b_A133H, PspCas13b_A1058H, dPspCas13b truncation, dAdmCas13d, dAspCas13b, dAspCas13c, dBmaCas13a, dBzoCas13b, dCamCas13a, dCcaCas13b, dCga2Cas13a, dCgaCas13a, dEbaCas13a, dEreCas13a, dEsCas13d, dFbrCas13b, dFnbCas13c, dFndCas13c, dFnfCas13c, dFnsCas13c, dFpeCas13c, dFulCas13c, dHheCas13a, dLbfCas13a, dLbmCas13a, dLbnCas13a, dLbuCas13a, dLseCas13a, dLshCas13a, dLspCas13a, dLwa2cas13a, dLwaCas13a, dLweCas13a, dPauCas13b, dPbuCas13b, dPgiCas13b, dPguCas13b, dPin2Cas13b, dPin3Cas13b, dPinCas13b, dPprCas13a, dPsaCas13b, dPsmCas13b, dRaCas13d, dRanCas13b, dRcdCas13a, dRcrCas13a, dRcsCas13a, dRfxCas13d, or dUrCas13d. Additional Cas proteins are known in the art (e.g., Konermann et al., Cell, 2018, 173:665-676 e14, Yan et al., Mol Cell, 2018, 7:327-339 e5; Cox, D. B. T., et al., Science, 2017, 358: 1019-1027; Abudayyeh et al., Nature, 2017, 550: 280-284, Gootenberg et al., Science, 2017, 356: 438-442; and East-Seletsky et al., Mol Cell, 2017, 66: 373-383 e3, which are herein incorporated by reference).

[0123] In one embodiment, the nucleic acid sequence encoding a Cas protein comprises a nucleic acid sequence encoding an amino acid sequence at least 70%, at least 71%, at least 72%, at least 73%, at least 74%, at least 75%, at least 76%, at least 77%, at least 78%, at least 79%, at least 80%, at least 81%, at least 82%, at least 83%, at least 84%, at least 85%, at least 86%, at least 87%, at least 88%, at least 89%, at least 90%, at least 91%, at least 92%, at least 93%, at least 94%, at least 95%, at least 96%, at least 97%, at least 98%, or at least 99% identical to one of SEQ ID NOs: 1-49. In one embodiment, the nucleic acid sequence encoding a Cas protein comprises a nucleic acid sequence encoding an amino acid sequence of one of SEQ ID NOs:1-49. In one embodiment, the nucleic acid sequence encoding a Cas protein comprises a nucleic acid sequence encoding an amino acid sequence of one of SEQ ID NOs:1-47.

[0124] In one embodiment, the nucleic acid sequence encoding a Cas protein comprises a nucleic acid sequence at least 70%, at least 71%, at least 72%, at least 73%, at least 74%, at least 75%, at least 76%, at least 77%, at least 78%, at least 79%, at least 80%, at least 81%, at least 82%, at least 83%, at least 84%, at least 85%, at least 86%, at least 87%, at least 88%, at least 89%, at least 90%, at least 91%, at least 92%, at least 93%, at least 94%, at least 95%, at least 96%, at least 97%, at least 98%, or at least 99% identical to one of SEQ ID NOs: 132-135. In one embodiment, the nucleic acid sequence encoding a Cas protein comprises a nucleic acid sequence of one of SEQ ID NOs: 132-135. In one embodiment, the nucleic acid sequence encoding a Cas protein comprises a nucleic acid sequence of one of SEQ ID NOs:132 or 133.

### Localization Signal

[0125] In some embodiments, the nucleic acid molecule comprises a nucleic acid sequence encoding a localization signal, such as a nuclear localization signal (NLS), nuclear export signal (NES) or other localization signals to localize to the cytoplasm or to organelles, such as mitochondria. In one embodiment, the localization signal localizes the protein to the site in which the target RNA is located.

### Nuclear Localization Signal

[0126] In one embodiment, the nucleic acid molecule comprises a nucleic acid sequence encoding a nuclear localization signal (NLS). In one embodiment, the NLS is a retrotransposon NLS. In one embodiment, the NLS is derived from Ty1, yeast GAL4, SKI3, L29 or histone H2B proteins, polyoma virus large T protein, VP1 or VP2 capsid protein, SV40 VP1 or VP2 capsid protein, Adenovirus El a or DBP protein, influenza virus NS1 protein, hepatitis vims core antigen or the mammalian lamin, c-myc, max, c-myb, p53, c-erbA, jun, Tax, steroid receptor or Mx proteins, Nucleoplasmin (NPM2), Nucleophosmin (NPM1), or simian vims 40 (“SV40”) T-antigen.

[0127] In one embodiment, the NLS is a Ty1 or Ty1-derived NLS, a Ty2 or Ty2-derived NLS or a MAK11 or MAK11-derived NLS. In one embodiment, the Ty1 NLS comprises an amino acid sequence of SEQ ID NO:50. In one embodiment, the Ty2 NLS comprises an amino acid sequence of SEQ ID NO:51. In one embodiment, the MAK11 NLS comprises an amino acid sequence of SEQ ID NO:52. In one embodiment, the nucleic acid sequence encoding a NLS comprises a nucleic acid sequence encoding an amino acid sequence at least 70%, at least 71%, at least 72%, at least 73%, at least 74%, at least 75%, at least 76%, at least 77%, at least 78%, at least 79%, at least 80%, at least 81%, at least 82%, at least 83%, at least 84%, at least 85%, at least 86%, at least 87%, at least 88%, at least 89%, at least 90%, at least 91%, at least 92%, at least 93%, at least 94%, at least 95%, at least 96%, at least 97%, at least 98%, or at least 99% identical to one of SEQ ID NOs: 50-57 and 298-910. In one embodiment, the nucleic acid sequence encoding a NLS comprises a nucleic acid sequence encoding an amino acid sequence of one of SEQ ID NOs: 50-57 and 298-910.

[0128] In one embodiment, the NLS is a Ty1-like NLS. For example, in one embodiment, the Ty1-like NLS comprises KKRX motif. In one embodiment, the Ty1-like NLS comprises KKRX motif at the N-terminal end. In one embodiment, the Ty1-like NLS comprises KKR motif. In one embodiment, the Ty1-like NLS comprises KKR motif at the C-terminal end. In one embodiment, the Ty1-like NLS comprises a KKRX and a KKR motif. In one embodiment, the Ty1-like NLS comprises a KKRX at the N-terminal end and a KKR motif at the C-terminal end. In one embodiment, the Ty1-like NLS comprises at least 20 amino acids. In one embodiment, the Ty1-like NLS comprises between 20 and 40 amino acids. In one embodiment, the nucleic acid sequence encoding a Ty1-like NLS comprises a nucleic acid sequence encoding an amino acid sequence at least 70%, at least 71%, at least 72%, at least 73%, at least 74%, at least 75%, at least 76%, at least 77%, at least 78%, at least 79%, at least 80%, at least 81%, at least 82%, at least 83%, at least 84%, at least 85%, at least 86%, at least 87%, at least 88%, at least 89%, at least 90%, at least 91%, at least 92%, at least 93%, at least 94%, at least 95%, at least 96%, at least 97%, at least 98%, or at least 99% identical to one of SEQ ID NOs: 298-910. In one embodiment, the nucleic acid sequence encoding a Ty1-like NLS comprises a nucleic acid sequence encoding an amino acid sequence of one of SEQ ID NOs: 298-910, wherein the sequence comprises one or more, two or more, three or more, four or more, five or more, six or more, seven or more, eight or more, nine or more, or ten or more, insertions, deletions or substitutions. In one embodiment, the nucleic acid sequence encoding a Ty1-like NLS comprises a nucleic acid sequence encoding an amino acid sequence of one of SEQ ID NOs: 298-910.

[0129] In one embodiment, the nucleic acid sequence encoding an NLS encodes two copies of the same NLS. For example, in one embodiment, the nucleic acid sequence encodes a multimer of a first Ty1-derived NLS and a second Ty1-derived NLS.

[0130] In one embodiment, the nucleic acid sequence encoding a NLS comprises a nucleic acid sequence at least 70%, at least 71%, at least 72%, at least 73%, at least 74%, at least 75%, at least 76%, at least 77%, at least 78%, at least 79%, at least 80%, at least 81%, at least 82%, at least 83%, at least 84%, at least 85%, at least 86%, at least 87%, at least 88%, at least 89%, at least 90%, at least 91%, at least 92%, at least 93%, at least 94%, at least 95%, at least 96%, at least 97%, at least 98%, or at least 99% identical to SEQ ID NO:136. In one embodiment, the nucleic acid sequence encoding a NLS comprises a nucleic acid sequence of SEQ ID NO: 136.

### Nuclear Export Signal

[0131] In one embodiment, the nucleic acid molecule comprises a nucleic acid sequence encoding a Nuclear Export Signal (NES). In one embodiment, the NES localizes the protein to the cytoplasm for targeting cytoplasmic RNA. In one embodiment, the nucleic acid sequence encoding the NES comprises a sequence encoding an amino acid sequence at least 70%, at least 71%, at least 72%, at least 73%, at least 74%, at least 75%, at least 76%, at least 77%, at least 78%, at least 79%, at least 80%, at least 81%, at least 82%, at least 83%, at least 84%, at least 85%, at least 86%, at least 87%, at least 88%, at least 89%, at least 90%, at least 91%, at least 92%, at least 93%, at least 94%, at least 95%, at least 96%, at least 97%, at least 98%, or at least 99% identical to SEQ ID NOs: 58 or 59. In one embodiment, the nucleic acid sequence encoding the NES comprises a sequence encoding an amino acid sequence of SEQ ID NOs: 58 or 59.

[0132] In one embodiment, the nucleic acid sequence encoding the NES comprises a sequence at least 70%, at least 71%, at least 72%, at least 73%, at least 74%, at least 75%, at least 76%, at least 77%, at least 78%, at least 79%, at least 80%, at least 81%, at least 82%, at least 83%, at least 84%, at least 85%, at least 86%, at least 87%, at least 88%, at least 89%, at least 90%, at least 91%, at least 92%, at least 93%, at least 94%, at least 95%, at least 96%, at least 97%, at least 98%, or at least 99% identical to SEQ ID NOs: 137 or 138. In one embodiment, the nucleic acid sequence encoding the NES comprises a sequence of SEQ ID NOs: 137 or 138.

### Organelle Localization Signal

[0133] In one embodiment, the nucleic acid molecule comprises a nucleic acid sequence encoding a localization signal that localizes the protein to an organelle or extracellularly. In one embodiment, the localization signal localizes the protein to the nucleolus, ribosome, vesicle, rough endoplasmic reticulum, Golgi apparatus, cytoskeleton, smooth endoplasmic reticulum, mitochondria, vacuole, cytosol, lysosome, or centriole. A number of localization signals are known in the art.

[0134] Exemplary localization signals include, but are not limited to 1× mitochondrial targeting sequence, 4× mitochondrial targeting sequence, secretory signal sequence (IL-2), myristylation, Calsequestrin leader, KDEL retention and peroxisome targeting sequence.

[0135] In one embodiment, the nucleic acid molecule comprises a nucleic acid sequence encoding a localization signal. In one embodiment, the localization signal localizes the protein to an organelle or extracellularly. In one embodiment, the nucleic acid sequence encoding the localization signal comprises a sequence encoding an amino acid sequence at least 70%, at least 71%, at least 72%, at least 73%, at least 74%, at least 75%, at least 76%, at least 77%, at least 78%, at least 79%, at least 80%, at least 81%, at least 82%, at least 83%, at least 84%, at least 85%, at least 86%, at least 87%, at least 88%, at least 89%, at least 90%, at least 91%, at least 92%, at least 93%, at least 94%, at least 95%, at least 96%, at least 97%, at least 98%, or at least 99% identical to one of SEQ ID NOs: 60-66. In one embodiment, the nucleic acid sequence encoding the localization signal comprises a sequence encoding an amino acid sequence of one of SEQ ID NOs: 60-66.

[0136] In one embodiment, the nucleic acid sequence encoding the localization signal comprises a sequence at least 70%, at least 71%, at least 72%, at least 73%, at least 74%, at least 75%, at least 76%, at least 77%, at least 78%, at least 79%, at least 80%, at least 81%, at least 82%, at least 83%, at least 84%, at least 85%, at least 86%, at least 87%, at least 88%, at least 89%, at least 90%, at least 91%, at least 92%, at least 93%, at least 94%, at least 95%, at least 96%, at least 97%, at least 98%, or at least 99% identical to one of SEQ ID NOs:139-145. In one embodiment, the nucleic acid sequence encoding the localization signal comprises a sequence of one of SEQ ID NOs: 139-145.

Purification and/or Detection Tag

[0137] In one embodiment, the nucleic acid molecule comprises a nucleic acid sequence encoding a purification and/or detection tag. In one embodiment, the tag is on the N-terminal end of the protein. In one embodiment, the tag is a 3×FLAG tag. In one embodiment, nucleic acid sequence encoding a purification and/or detection tag encodes an amino acid sequence at least 70%, at least 71%, at least 72%, at least 73%, at least 74%, at least 75%, at least 76%, at least 77%, at least 78%, at least 79%, at least 80%, at least 81%, at least 82%, at least 83%, at least 84%, at least 85%, at least 86%, at least 87%, at least 88%, at least 89%, at least 90%, at least 91%, at least 92%, at least 93%, at least 94%, at least 95%, at least 96%, at least 97%, at least 98%, or at least 99% identical to SEQ ID NO:67. In one embodiment, nucleic acid sequence encoding a purification and/or detection tag encodes an amino acid sequence of SEQ ID NO:67.

[0138] In one embodiment, nucleic acid sequence encoding a purification and/or detection tag comprises sequence at least 70%, at least 71%, at least 72%, at least 73%, at least 74%, at least 75%, at least 76%, at least 77%, at least 78%, at least 79%, at least 80%, at least 81%, at least 82%, at least 83%, at least 84%, at least 85%, at least 86%, at least 87%, at least 88%, at least 89%, at least 90%, at least 91%, at least 92%, at least 93%, at least 94%, at least 95%, at least 96%, at least 97%, at least 98%, or at least 99% identical to SEQ ID NO: 146. In one embodiment, nucleic acid sequence encoding a purification and/or detection tag comprises a sequence of SEQ ID NO: 146.

### Fusion Proteins

[0139] In one embodiment, the nucleic acid molecule comprises a nucleic acid sequence encoding a protein of the disclosure, which is effectively delivered to the nucleus, an organelle, the cytoplasm or extracellularly and allow for targeted viral RNA cleavage. In one embodiment, the nucleic acid sequence encoding a protein encodes an amino acid sequence at least 70%, at least 71%, at least 72%, at least 73%, at least 74%, at least 75%, at least 76%, at least 77%, at least 78%, at least 79%, at least 80%, at least 81%, at least 82%, at least 83%, at least 84%, at least 85%, at least 86%, at least 87%, at least 88%, at least 89%, at least 90%, at least 91%, at least 92%, at least 93%, at least 94%, at least 95%, at least 96%, at least 97%, at least 98%, or at least 99% identical to one of SEQ ID NOs: 68-100. In one embodiment, the nucleic acid sequence encoding a protein encodes an amino acid sequence of one of SEQ ID NOs: 68-100.

[0140] In one embodiment, the nucleic acid sequence encoding a protein comprises a sequence at least 70%, at least 71%, at least 72%, at least 73%, at least 74%, at least 75%, at least 76%, at least 77%, at least 78%, at least 79%, at least 80%, at least 81%, at least 82%, at least 83%, at least 84%, at least 85%, at least 86%, at least 87%, at least 88%, at least 89%, at least 90%, at least 91%, at least 92%, at least 93%, at least 94%, at least 95%, at least 96%, at least 97%, at least 98%, or at least 99% identical to one of SEQ ID NOs: 147-166. In one embodiment, the nucleic acid sequence encoding a protein comprises a sequence of one of SEQ ID NOs: 147-166.

Targeting Nucleic Acids and CRISPR RNAs (crRNAs)

[0141] In one aspect, the disclosure provides CRISPR RNAs (crRNAs) for targeting Cas to a target viral RNA. In one embodiment, crRNA comprises guide sequence. In one embodiment, the crRNA comprises a direct repeat (DR) sequence. In one embodiment the crRNA comprises a direct repeat sequence and a guide sequence fused or linked to a guide sequence or spacer sequence. In one embodiment the direct repeat sequence may be located upstream (i.e., 5′) from the guide sequence or spacer sequence. In other embodiments, the direct repeat sequence may be located downstream (i.e., 3′) from the guide sequence or spacer sequence.

[0142] In some embodiments, the crRNA comprises a stem loop. In one embodiment, the crRNA comprises a single stem loop. In one embodiment, the direct repeat sequence forms a stem loop. In one embodiment, the direct repeat sequence forms a single stem loop.

[0143] In one embodiment, the spacer length of the guide RNA is from 15 to 35 nt. In one embodiment, the spacer length of the guide RNA is at least 15 nucleotides. In one embodiment the spacer length is from 15 to 17 nt, e.g., 15, 16, or 17 nt, from 17 to 20 nt, e.g., 17, 18, 19, or 20 nt, from 20 to 24 nt, e.g., 20, 21, 22, 23, or 24 nt, from 23 to 25 nt, e.g., 23, 24, or 25 nt, from 24 to 27 nt, e.g., 24, 25, 26, or 27 nt, from 27-30 nt, e.g., 27, 28, 29, or 30 nt, from 30-35 nt, e.g., 30, 31, 32, 33, 34, or 35 nt, or 35 nt or longer.

[0144] In general, a guide sequence is any polynucleotide sequence having sufficient complementarity with a target polynucleotide sequence to hybridize with the target sequence and direct sequence-specific binding of a CRISPR complex to the target sequence. In some embodiments, the degree of complementarity between a guide sequence and its corresponding target sequence, when optimally aligned using a suitable alignment algorithm, is about or more than about 50%, 60%, 75%, 80%, 85%, 90%, 95%, 97.5%, 99%, or more. Optimal alignment may be determined with the use of any suitable algorithm for aligning sequences, non-limiting example of which include the Smith-Waterman algorithm, the Needleman-Wunsch algorithm, algorithms based on the Burrows-Wheeler Transform (e.g. the Burrows Wheeler Aligner), ClustalW, Clustal X, BLAT, Novoalign (Novocraft Technologies; available at www.novocraft.com), ELAND (Illumina, San Diego, Calif), SOAP (available at soap.genomics.org.cn), and Maq (available at maq.sourceforge.net). In some embodiments, a guide sequence is about or more than about 5, 10, 11, 12, 13, 14, 15, 16, 17, 18, 19, 20, 21, 22, 23, 24, 25, 26, 27, 28, 29, 30, 35, 40, 45, 50, 75, or more nucleotides in length. In some embodiments, a guide sequence is less than about 75, 50, 45, 40, 35, 30, 25, 20, 15, 12, or fewer nucleotides in length. Preferably the guide sequence is 10 30 nucleotides long. The ability of a guide sequence to direct sequence-specific binding of a CRISPR complex to a target sequence may be assessed by any suitable assay. For example, the components of a CRISPR system sufficient to form a CRISPR complex, including the guide sequence to be tested, may be provided to a host cell having the corresponding target sequence, such as by transfection with vectors encoding the components of the CRISPR sequence, followed by an assessment of preferential cleavage within the target sequence, such as by Surveyor assay as described herein. Similarly, cleavage of a target polynucleotide sequence may be evaluated in a test tube by providing the target sequence, components of a CRISPR complex, including the guide sequence to be tested and a control guide sequence different from the test guide sequence, and comparing binding or rate of cleavage at the target sequence between the test and control guide sequence reactions. Other assays are possible, and will occur to those skilled in the art.

[0145] In some embodiments of CRISPR-Cas systems, the degree of complementarity between a guide sequence and its corresponding target sequence can be about or more than about 50%, 60%, 75%, 80%, 85%, 90%, 95%, 97.5%, 99%, or 100%; a guide or RNA or sgRNA can be about or more than about 5, 10, 11, 12, 13, 14, 15, 16, 17, 18, 19, 20, 21, 22, 23, 24, 25, 26, 27, 28, 29, 30, 35, 40, 45, 50, 75, or more nucleotides in length; or guide or RNA or sgRNA can be less than about 75, 50, 45, 40, 35, 30, 25, 20, 15, 12, or fewer nucleotides in length; and advantageously tracr RNA is 30 or 50 nucleotides in length. However, an aspect of the disclosure is to reduce off-target interactions, e.g., reduce the guide interacting with a target sequence having low complementarity. Indeed, in the examples, it is shown that the disclosure involves mutations that result in the CRISPR-Cas system being able to distinguish between target and off-target sequences that have greater than 80% to about 95% complementarity, e.g., 83%-84% or 88-89% or 94-95% complementarity (for instance, distinguishing between a target having 18 nucleotides from an off-target of 18 nucleotides having 1, 2 or 3 mismatches). Accordingly, in the context of the present disclosure the degree of complementarity between a guide sequence and its corresponding target sequence is greater than 94.5% or 95% or 95.5% or 96% or 96.5% or 97% or 97.5% or 98% or 98.5% or 99% or 99.5% or 99.9%, or 100%. Off target is less than 100% or 99.9% or 99.5% or 99% or 99% or 98.5% or 98% or 97.5% or 97% or 96.5% or 96% or 95.5% or 95% or 94.5% or 94% or 93% or 92% or 91% or 90% or 89% or 88% or 87% or 86% or 85% or 84% or 83% or 82% or 81% or 80% complementarity between the sequence and the guide, with it advantageous that off target is 100% or 99.9% or 99.5% or 99% or 99% or 98.5% or 98% or 97.5% or 97% or 96.5% or 96% or 95.5% or 95% or 94.5% complementarity between the sequence and the guide.

[0146] In one embodiment, the crRNA comprises a sequence substantially complementary to a viral RNA sequence. In one embodiment, the crRNA comprises a sequence substantially complementary to a Coronavirus genomic mRNA sequence or a Coronavirus subgenomic mRNA sequence. For example, in one embodiment, the crRNA comprises a sequence substantially complementary to a Coronavirus leader sequence, S sequence, E sequence, M sequence, N sequence, or S2M sequence. In one embodiment, the crRNA comprises a sequence substantially complementary to a Coronavirus leader sequence, N sequence, or S2M sequence.

[0147] In one embodiment, the crRNA comprises a sequence that is substantially complementary to a sequence at least 70%, at least 71%, at least 72%, at least 73%, at least 74%, at least 75%, at least 76%, at least 77%, at least 78%, at least 79%, at least 80%, at least 81%, at least 82%, at least 83%, at least 84%, at least 85%, at least 86%, at least 87%, at least 88%, at least 89%, at least 90%, at least 91%, at least 92%, at least 93%, at least 94%, at least 95%, at least 96%, at least 97%, at least 98%, or at least 99% homologous to a sequence selected from SEQ ID NOs: 167-187, or a fragment thereof. In one embodiment, the crRNA comprises a sequence that is substantially complementary to a sequence selected from SEQ ID NOs: 167-187, or a fragment thereof.

[0148] In one embodiment, the crRNA comprises a sequence that is substantially complementary to a sequence at least 70%, at least 71%, at least 72%, at least 73%, at least 74%, at least 75%, at least 76%, at least 77%, at least 78%, at least 79%, at least 80%, at least 81%, at least 82%, at least 83%, at least 84%, at least 85%, at least 86%, at least 87%, at least 88%, at least 89%, at least 90%, at least 91%, at least 92%, at least 93%, at least 94%, at least 95%, at least 96%, at least 97%, at least 98%, or at least 99% homologous to a fragment of a sequence selected from SEQ ID NOs: 167, 175, or 182-185. In one embodiment, the crRNA comprises a sequence that is substantially complementary to a fragment of a sequence selected from SEQ ID NOs: 167, 175, or 182-185.

[0149] In one embodiment, the crRNA comprises a sequence that is substantially complementary to a sequence at least 70%, at least 71%, at least 72%, at least 73%, at least 74%, at least 75%, at least 76%, at least 77%, at least 78%, at least 79%, at least 80%, at least 81%, at least 82%, at least 83%, at least 84%, at least 85%, at least 86%, at least 87%, at least 88%, at least 89%, at least 90%, at least 91%, at least 92%, at least 93%, at least 94%, at least 95%, at least 96%, at least 97%, at least 98%, or at least 99% homologous to a sequence selected from SEQ ID NOs: 168-174, 176-181, 186, and 187. In one embodiment, the crRNA comprises a sequence that is substantially complementary to a sequence selected from SEQ ID NOs: 168-174, 176-181, 186, and 187.

[0150] In one embodiment, the crRNA comprises a sequence at least 70%, at least 71%, at least 72%, at least 73%, at least 74%, at least 75%, at least 76%, at least 77%, at least 78%, at least 79%, at least 80%, at least 81%, at least 82%, at least 83%, at least 84%, at least 85%, at least 86%, at least 87%, at least 88%, at least 89%, at least 90%, at least 91%, at least 92%, at least 93%, at least 94%, at least 95%, at least 96%, at least 97%, at least 98%, or at least 99% homologous to a sequence selected from SEQ ID NOs: 189-224. In one embodiment, the crRNA comprises a sequence selected from SEQ ID NOs: 189-224.

[0151] In one embodiment, the disclosure provides crRNA having a sequence substantially complementary to an influenza virus sequence. In one embodiment, the crRNA comprises a sequence substantially complementary to an influenza virus genomic mRNA sequence or a subgenomic mRNA sequence. For example, in one embodiment, the crRNA comprises a sequence substantially complementary to an Influenza virus PB2 sequence, PB1 sequence, PA sequence, HA sequence, NP sequence, NA sequence, M sequence or NS sequence. In one embodiment, the crRNA comprises a sequence substantially complementary to an Influenza virus PB2 sequence, PB1 sequence, PA sequence, NP sequence, or M sequence.

[0152] In one embodiment, the crRNA comprises a sequence that is substantially complementary to a sequence at least 70%, at least 71%, at least 72%, at least 73%, at least 74%, at least 75%, at least 76%, at least 77%, at least 78%, at least 79%, at least 80%, at least 81%, at least 82%, at least 83%, at least 84%, at least 85%, at least 86%, at least 87%, at least 88%, at least 89%, at least 90%, at least 91%, at least 92%, at least 93%, at least 94%, at least 95%, at least 96%, at least 97%, at least 98%, or at least 99% homologous to a sequence selected from SEQ ID NOs:225-244, or a fragment thereof. In one embodiment, the crRNA comprises a sequence that is substantially complementary to a sequence selected from SEQ ID NOs: 225-244, or a fragment thereof.

[0153] In one embodiment, the crRNA comprises a sequence that is substantially complementary to a viral RNA sequence. In one embodiment, the crRNA comprises a sequence that is substantially complementary to a sequence a positive-sense viral RNA sequence. In one embodiment, the crRNA comprises a sequence that is substantially complementary to a sequence a negative-sense viral RNA sequence. In one embodiment, the crRNA comprises a sequence that at least 70%, at least 71%, at least 72%, at least 73%, at least 74%, at least 75%, at least 76%, at least 77%, at least 78%, at least 79%, at least 80%, at least 81%, at least 82%, at least 83%, at least 84%, at least 85%, at least 86%, at least 87%, at least 88%, at least 89%, at least 90%, at least 91%, at least 92%, at least 93%, at least 94%, at least 95%, at least 96%, at least 97%, at least 98%, or at least 99% homologous to a sequence selected from SEQ ID NOs: 245-264. In one embodiment, the crRNA comprises a sequence selected from SEQ ID NOs: 245-264.

[0154] In one embodiment, the crRNA comprises a direct repeat (DR) sequence. In one embodiment, the DR sequence is 5′ of the sequence substantially complementary to the target sequence. For example, in one embodiment, the DR sequence is 5′ of the sequence substantially complementary to a Coronavirus genomic mRNA sequence or a Coronavirus subgenomic mRNA sequence. In one embodiment, the DR sequence is 5′ of the sequence substantially complementary to an influenza virus genomic RNA sequence or a influenza virus subgenomic RNA sequence. In one embodiment, the DR sequence is 5′ of the sequence substantially complementary to an expanded RNA repeat sequence. In one embodiment, the DR sequence enhances the activity of Cas13 targeting to a target sequence, Cas13 catalytic activity, or both. For example, in one embodiment, the DR sequence comprises a mutation. For example, in one embodiment, the DR sequence comprises a T17C point mutation. In one embodiment, the DR sequence comprises a T18C point mutation. In one embodiment, the DR sequence is 5′ of a sequence at least 80% homologous to a sequence selected from SEQ ID NOs: 189-224 and 245-264.

[0155] In one embodiment, the DR sequence is 3′ of the sequence substantially complementary to the target sequence. For example, in one embodiment, the DR sequence is 3′ of the sequence substantially complementary to a Coronavirus genomic mRNA sequence or a Coronavirus subgenomic mRNA sequence. In one embodiment, the DR sequence is 3′ of the sequence substantially complementary to an Influenza virus genomic mRNA sequence or an Influenza virus subgenomic mRNA sequence. In one embodiment, the DR sequence is 3′ of a sequence at least 70%, at least 71%, at least 72%, at least 73%, at least 74%, at least 75%, at least 76%, at least 77%, at least 78%, at least 79%, at least 80%, at least 81%, at least 82%, at least 83%, at least 84%, at least 85%, at least 86%, at least 87%, at least 88%, at least 89%, at least 90%, at least 91%, at least 92%, at least 93%, at least 94%, at least 95%, at least 96%, at least 97%, at least 98%, or at least 99% homologous to a sequence selected from SEQ ID NOs: 189-224 and 245-264.

[0156] In one embodiment, selection of a 5′ or 3′ DR sequence is dependent on the Cas protein ortholog used. In one embodiment the DR sequence comprises a sequence selected from SEQ ID NOs: 265-274.

### Tandem Arrays

[0157] In one embodiment, the disclosure provides tandem crRNA arrays. In one embodiment, the tandem crRNA arrays allow for a single promoter to drive expression of multiple crRNAs. In one embodiment, the tandem array comprises one or more, two or more, three or more, four or more, five or more six or more, seven or more or eight or more crRNA sequences.

[0158] In one embodiment, each crRNA in the tandem crRNA array comprises a direct repeat (DR) sequence and a spacer sequence. In one embodiment the direct repeat sequence may be located upstream (i.e., 5′) from the guide sequence or spacer sequence. In other embodiments, the direct repeat sequence may be located downstream (i.e., 3′) from the guide sequence or spacer sequence.

[0159] In one embodiment the direct repeat sequence comprises a sequence of one of SEQ ID NOs: 265-274. In one embodiment, the direct repeat sequence includes a single mutation in the poly T stretch. For example, in one embodiment, the direct repeat sequence comprises a sequence selected from SEQ ID NOs: 268-274.

[0160] In one embodiment, each crRNA in the tandem crRNA array comprises a different direct repeat sequence. For example, in one embodiment, nucleotide substitutions within the loop region of the direct repeat, multiple guide-RNAs provides for efficiently generated ordered arrays of crRNAs.

[0161] In one embodiment, the tandem array comprises at least two or more crRNA comprising sequences substantially complementary to a genomic coronavirus RNA sequence and/or a sub-genomic coronavirus RNA sequence. In one embodiment, the tandem array comprises at least two or more crRNA comprising a substantially complementary to a sequence at least 70%, at least 71%, at least 72%, at least 73%, at least 74%, at least 75%, at least 76%, at least 77%, at least 78%, at least 79%, at least 80%, at least 81%, at least 82%, at least 83%, at least 84%, at least 85%, at least 86%, at least 87%, at least 88%, at least 89%, at least 90%, at least 91%, at least 92%, at least 93%, at least 94%, at least 95%, at least 96%, at least 97%, at least 98%, or at least 99% homologous to a sequence selected from SEQ ID NOs: 167-188 or a fragment thereof. In one embodiment, the tandem array comprises at least two or more crRNA comprising a substantially complementary to a sequence selected from SEQ ID NOs: 167-188, or a fragment thereof.

[0162] In one embodiment, the tandem array comprises at least two or more crRNA comprising a substantially complementary to a sequence at least 70%, at least 71%, at least 72%, at least 73%, at least 74%, at least 75%, at least 76%, at least 77%, at least 78%, at least 79%, at least 80%, at least 81%, at least 82%, at least 83%, at least 84%, at least 85%, at least 86%, at least 87%, at least 88%, at least 89%, at least 90%, at least 91%, at least 92%, at least 93%, at least 94%, at least 95%, at least 96%, at least 97%, at least 98%, or at least 99% homologous to a sequence selected from SEQ ID NOs: 168-174, 176-181, 186, and 187. In one embodiment, the tandem array comprises at least two or more crRNA comprising a substantially complementary to a sequence selected from SEQ ID NOs: 168-174, 176-181, 186, and 187.

[0163] In one embodiment, the tandem array comprises at least two or more crRNA comprising a sequence at least 70%, at least 71%, at least 72%, at least 73%, at least 74%, at least 75%, at least 76%, at least 77%, at least 78%, at least 79%, at least 80%, at least 81%, at least 82%, at least 83%, at least 84%, at least 85%, at least 86%, at least 87%, at least 88%, at least 89%, at least 90%, at least 91%, at least 92%, at least 93%, at least 94%, at least 95%, at least 96%, at least 97%, at least 98%, or at least 99% homologous to a sequence selected from SEQ ID NOs: 189-224. In one embodiment, the tandem array comprises at least two or more crRNA comprising a sequence selected from SEQ ID NOs: 189-224.

[0164] In one embodiment, the tandem array comprises a sequence at least 70%, at least 71%, at least 72%, at least 73%, at least 74%, at least 75%, at least 76%, at least 77%, at least 78%, at least 79%, at least 80%, at least 81%, at least 82%, at least 83%, at least 84%, at least 85%, at least 86%, at least 87%, at least 88%, at least 89%, at least 90%, at least 91%, at least 92%, at least 93%, at least 94%, at least 95%, at least 96%, at least 97%, at least 98%, or at least 99% homologous to SEQ ID NO:275. In one embodiment, the tandem array comprises a sequence of SEQ ID NO: 275.

[0165] In one embodiment, the tandem array comprises at least two or more crRNA each independently comprising sequences substantially complementary to an influenza virus sequence. In one embodiment, the tandem array comprises at least two or more crRNA each comprising a sequence substantially complementary to an influenza virus genomic mRNA sequence or a subgenomic mRNA sequence. In one embodiment, the tandem array comprises at least two or more crRNA each comprising a sequence substantially complementary to an Influenza virus PB2 sequence, PB1 sequence, PA sequence, HA sequence, NP sequence, NA sequence, M sequence or NS sequence.

[0166] In one embodiment, the tandem array comprises at least two or more crRNA comprising a substantially complementary to a sequence at least 70%, at least 71%, at least 72%, at least 73%, at least 74%, at least 75%, at least 76%, at least 77%, at least 78%, at least 79%, at least 80%, at least 81%, at least 82%, at least 83%, at least 84%, at least 85%, at least 86%, at least 87%, at least 88%, at least 89%, at least 90%, at least 91%, at least 92%, at least 93%, at least 94%, at least 95%, at least 96%, at least 97%, at least 98%, or at least 99% homologous to a sequence selected from SEQ ID NOs: 225-244 or a fragment thereof. In one embodiment, the tandem array comprises at least two or more crRNA comprising a substantially complementary to a sequence selected from SEQ ID NOs: 225-244, or a fragment thereof.

[0167] In one embodiment, the tandem array comprises at least two or more crRNA comprising a sequence each targeting a different positive sense vRNA segment 1, 2, 3, 5 or 7. In one embodiment, the tandem array comprises at least two or more crRNA comprising a sequence at least 70%, at least 71%, at least 72%, at least 73%, at least 74%, at least 75%, at least 76%, at least 77%, at least 78%, at least 79%, at least 80%, at least 81%, at least 82%, at least 83%, at least 84%, at least 85%, at least 86%, at least 87%, at least 88%, at least 89%, at least 90%, at least 91%, at least 92%, at least 93%, at least 94%, at least 95%, at least 96%, at least 97%, at least 98%, or at least 99% homologous to a sequence selected from SEQ ID NOs: 216-225. In one embodiment, the tandem array comprises at least two or more crRNA comprising a sequence selected from SEQ ID NOs: 245-264. In one embodiment, the tandem array comprises at least two or more crRNA comprising a sequence at least 70%, at least 71%, at least 72%, at least 73%, at least 74%, at least 75%, at least 76%, at least 77%, at least 78%, at least 79%, at least 80%, at least 81%, at least 82%, at least 83%, at least 84%, at least 85%, at least 86%, at least 87%, at least 88%, at least 89%, at least 90%, at least 91%, at least 92%, at least 93%, at least 94%, at least 95%, at least 96%, at least 97%, at least 98%, or at least 99% homologous to a sequence selected from SEQ ID NOs: 255-259. In one embodiment, the tandem array comprises at least two or more crRNA comprising a sequence selected from SEQ ID NOs: 255-259.

[0168] In one embodiment, the tandem array comprises at least two or more crRNA comprising a sequence each targeting a different negative sense vRNA segment 1, 2, 3, 5 or 7. In one embodiment, the tandem array comprises at least two or more crRNA comprising a sequence at least 70%, at least 71%, at least 72%, at least 73%, at least 74%, at least 75%, at least 76%, at least 77%, at least 78%, at least 79%, at least 80%, at least 81%, at least 82%, at least 83%, at least 84%, at least 85%, at least 86%, at least 87%, at least 88%, at least 89%, at least 90%, at least 91%, at least 92%, at least 93%, at least 94%, at least 95%, at least 96%, at least 97%, at least 98%, or at least 99% homologous to a sequence selected from SEQ ID NOs: 245-249. In one embodiment, the tandem array comprises at least two or more crRNA comprising a sequence selected from SEQ ID NOs: 245-249. In one embodiment, the tandem array comprises at least two or more crRNA comprising a sequence at least 70%, at least 71%, at least 72%, at least 73%, at least 74%, at least 75%, at least 76%, at least 77%, at least 78%, at least 79%, at least 80%, at least 81%, at least 82%, at least 83%, at least 84%, at least 85%, at least 86%, at least 87%, at least 88%, at least 89%, at least 90%, at least 91%, at least 92%, at least 93%, at least 94%, at least 95%, at least 96%, at least 97%, at least 98%, or at least 99% homologous to a sequence selected from SEQ ID NOs: 260-264. In one embodiment, the tandem array comprises at least two or more crRNA comprising a sequence selected from SEQ ID NOs: 260-264.

[0169] In one embodiment, the tandem array comprises at least two or more crRNA comprising a sequence at least 70%, at least 71%, at least 72%, at least 73%, at least 74%, at least 75%, at least 76%, at least 77%, at least 78%, at least 79%, at least 80%, at least 81%, at least 82%, at least 83%, at least 84%, at least 85%, at least 86%, at least 87%, at least 88%, at least 89%, at least 90%, at least 91%, at least 92%, at least 93%, at least 94%, at least 95%, at least 96%, at least 97%, at least 98%, or at least 99% homologous to a sequence selected from SEQ ID NOs: 250-254. In one embodiment, the tandem array comprises at least two or more crRNA comprising a sequence selected from SEQ ID NOs: 250-254.

[0170] In one embodiment, the tandem array comprises a sequence at least 70%, at least 71%, at least 72%, at least 73%, at least 74%, at least 75%, at least 76%, at least 77%, at least 78%, at least 79%, at least 80%, at least 81%, at least 82%, at least 83%, at least 84%, at least 85%, at least 86%, at least 87%, at least 88%, at least 89%, at least 90%, at least 91%, at least 92%, at least 93%, at least 94%, at least 95%, at least 96%, at least 97%, at least 98%, or at least 99% homologous to one of SEQ ID NOs: 276-279. In one embodiment, the tandem array comprises a sequence of SEQ ID NOs: 276-279.

### Nucleic Acids

[0171] The isolated nucleic acid sequences of the disclosure can be obtained using any of the many recombinant methods known in the art, such as, for example by screening libraries from cells expressing the gene, by deriving the gene from a vector known to include the same, or by isolating directly from cells and tissues containing the same, using standard techniques. Alternatively, the gene of interest can be produced synthetically, rather than cloned.

[0172] The isolated nucleic acid may comprise any type of nucleic acid, including, but not limited to DNA and RNA. For example, in one embodiment, the composition comprises an isolated DNA molecule, including for example, an isolated cDNA molecule, encoding a protein of the disclosure. In one embodiment, the composition comprises an isolated RNA molecule encoding a protein of the disclosure, or a functional fragment thereof.

[0173] The nucleic acid molecules of the present invention can be modified to improve stability in serum or in growth medium for cell cultures. Modifications can be added to enhance stability, functionality, and/or specificity and to minimize immunostimulatory properties of the nucleic acid molecule of the invention. For example, in order to enhance the stability, the 3′-residues may be stabilized against degradation, e.g., they may be selected such that they consist of purine nucleotides, particularly adenosine or guanosine nucleotides. Alternatively, substitution of pyrimidine nucleotides by modified analogues, e.g., substitution of uridine by 2′-deoxythymidine is tolerated and does not affect function of the molecule.

[0174] In one embodiment of the present invention the nucleic acid molecule may contain at least one modified nucleotide analogue. For example, the ends may be stabilized by incorporating modified nucleotide analogues.

[0175] Non-limiting examples of nucleotide analogues include sugar- and/or backbone-modified ribonucleotides (i.e., include modifications to the phosphate-sugar backbone). For example, the phosphodiester linkages of natural RNA may be modified to include at least one of a nitrogen or sulfur heteroatom. In exemplary backbone-modified ribonucleotides the phosphoester group connecting to adjacent ribonucleotides is replaced by a modified group, e.g., of phosphothioate group. In exemplary sugar-modified ribonucleotides, the 2′ OH-group is replaced by a group selected from H, OR, R, halo, SH, SR, NH₂, NHR, NR₂ or ON, wherein R is C₁-C₆ alkyl, alkenyl or alkynyl and halo is F, Cl, Br or I.

[0176] Other examples of modifications are nucleobase-modified ribonucleotides, i.e., ribonucleotides, containing at least one non-naturally occurring nucleobase instead of a naturally occurring nucleobase. Bases may be modified to block the activity of adenosine deaminase. Exemplary modified nucleobases include, but are not limited to, uridine and/or cytidine modified at the 5-position, e.g., 5-(2-amino)propyl uridine, 5-bromo uridine; adenosine and/or guanosines modified at the 8 position, e.g., 8-bromo guanosine; deaza nucleotides, e.g., 7-deaza-adenosine; O- and N-alkylated nucleotides, e.g., N6-methyl adenosine are suitable. It should be noted that the above modifications may be combined.

[0177] In some instances, the nucleic acid molecule comprises at least one of the following chemical modifications: 2′-H, 2′-O-methyl, or 2′-OH modification of one or more nucleotides. In certain embodiments, a nucleic acid molecule of the invention can have enhanced resistance to nucleases. For increased nuclease resistance, a nucleic acid molecule, can include, for example, 2′-modified ribose units and/or phosphorothioate linkages. For example, the 2′ hydroxyl group (OH) can be modified or replaced with a number of different “oxy” or “deoxy” substituents. For increased nuclease resistance the nucleic acid molecules of the invention can include 2′-O-methyl, 2′-fluorine, 2′-O-methoxyethyl, 2′-O-aminopropyl, 2′-amino, and/or phosphorothioate linkages. Inclusion of locked nucleic acids (LNA), ethylene nucleic acids (ENA), e.g., 2′-4′-ethylene-bridged nucleic acids, and certain nucleobase modifications such as 2-amino-A, 2-thio (e.g., 2-thio-U), G-clamp modifications, can also increase binding affinity to a target.

[0178] In one embodiment, the nucleic acid molecule includes a 2′-modified nucleotide, e.g., a 2′-deoxy, 2′-deoxy-2′-fluoro, 2′-O-methyl, 2′-O-methoxyethyl (2′-O-MOE), 2′-O-aminopropyl (2′-O-AP), 2′-O-dimethylaminoethyl (2′-O-DMAOE), 2′-O-dimethylaminopropyl (2′-O-DMAP), 2′-O-dimethylaminoethyloxyethyl (2′-O-DMAEOE), or 2′-O—N-methylacetamido (2′-O-NMA). In one embodiment, the nucleic acid molecule includes at least one 2′-O-methyl-modified nucleotide, and in some embodiments, all of the nucleotides of the nucleic acid molecule include a 2′-O-methyl modification.

[0179] In certain embodiments, the nucleic acid molecule of the invention has one or more of the following properties:

[0180] Nucleic acid agents discussed herein include otherwise unmodified RNA and DNA as well as RNA and DNA that have been modified, e.g., to improve efficacy, and polymers of nucleoside surrogates. Unmodified RNA refers to a molecule in which the components of the nucleic acid, namely sugars, bases, and phosphate moieties, are the same or essentially the same as that which occur in nature, or as occur naturally in the human body. The art has referred to rare or unusual, but naturally occurring, RNAs as modified RNAs, see, e.g., Limbach et al. (Nucleic Acids Res., 1994, 22:2183-2196). Such rare or unusual RNAs, often termed modified RNAs, are typically the result of a post-transcriptional modification and are within the term unmodified RNA as used herein. Modified RNA, as used herein, refers to a molecule in which one or more of the components of the nucleic acid, namely sugars, bases, and phosphate moieties, are different from that which occur in nature, or different from that which occurs in the human body. While they are referred to as “modified RNAs” they will of course, because of the modification, include molecules that are not, strictly speaking, RNAs. Nucleoside surrogates are molecules in which the ribophosphate backbone is replaced with a non-ribophosphate construct that allows the bases to be presented in the correct spatial relationship such that hybridization is substantially similar to what is seen with a ribophosphate backbone, e.g., non-charged mimics of the ribophosphate backbone.

[0181] Modifications of the nucleic acid of the invention may be present at one or more of, a phosphate group, a sugar group, backbone, N-terminus, C-terminus, or nucleobase.

[0182] The present invention also includes a vector in which the isolated nucleic acid of the present invention is inserted. The art is replete with suitable vectors that are useful in the present invention.

[0183] In brief summary, the expression of natural or synthetic nucleic acids encoding a protein of the disclosure is typically achieved by operably linking a nucleic acid encoding the protein of the disclosure or portions thereof to a promoter, and incorporating the construct into an expression vector. The vectors to be used are suitable for replication and, optionally, integration in eukaryotic cells. Typical vectors contain transcription and translation terminators, initiation sequences, and promoters useful for regulation of the expression of the desired nucleic acid sequence.

[0184] The vectors of the present invention may also be used for nucleic acid immunization and gene therapy, using standard gene delivery protocols. Methods for gene delivery are known in the art. See, e.g., U.S. Pat. Nos. 5,399,346, 5,580,859, 5,589,466, incorporated by reference herein in their entireties. In another embodiment, the invention provides a gene therapy vector.

[0185] The isolated nucleic acid of the invention can be cloned into a number of types of vectors. For example, the nucleic acid can be cloned into a vector including, but not limited to a plasmid, a phagemid, a phage derivative, an animal virus, and a cosmid. Vectors of particular interest include expression vectors, replication vectors, probe generation vectors, and sequencing vectors.

[0186] Further, the vector may be provided to a cell in the form of a viral vector. Viral vector technology is well known in the art and is described, for example, in Sambrook et al. (2012, Molecular Cloning: A Laboratory Manual, Cold Spring Harbor Laboratory, New York), and in other virology and molecular biology manuals. Viruses, which are useful as vectors include, but are not limited to, retroviruses, adenoviruses, adeno-associated viruses, herpes viruses, and lentiviruses. In general, a suitable vector contains an origin of replication functional in at least one organism, a promoter sequence, convenient restriction endonuclease sites, and one or more selectable markers, (e.g., WO 01/96584; WO 01/29058; and U.S. Pat. No. 6,326,193).

### Delivery Systems and Methods

[0187] In one aspect, the disclosure relates to the development of novel lentiviral packaging and delivery systems. The lentiviral particle delivers the viral enzymes as proteins. In this fashion, lentiviral enzymes are short lived, thus limiting the potential for off-target editing due to long term expression though the entire life of the cell. Thus, in one embodiment, the disclosure provides novel delivery systems for delivering a gene or genetic material.

[0188] The incorporation of editing components, or traditional CRISPR-Cas editing components as proteins in lentiviral particles is advantageous, given that their required activity is only required for a short period of time. Thus, in one embodiment, the disclosure provides a lentiviral delivery system and methods of delivering the compositions of the invention, editing genetic material, and nucleic acid delivery using lentiviral delivery systems.

[0189] In one embodiment, the delivery system comprises (1) a packaging plasmid (2) a transfer plasmid, and (3) an envelope plasmid. In one embodiment, the delivery system comprises (1) a packaging plasmid (2) an envelope plasmid, and (3) a VPR plasmid. In one embodiment, the packaging plasmid comprises a nucleic acid sequence encoding a gag-pol polyprotein. In one embodiment, the gag-pol polyprotein comprises catalytically dead integrase. In one embodiment, the gag-pol polyprotein comprises a mutation selected from D116N, D116A, D116E, D64V, D64E, and D64A.

[0190] In one embodiment, the transfer plasmid comprises a nucleic acid sequence encoding a crRNA sequence and Cas protein of the disclosure. For example, in one embodiment the transfer plasmid comprises a nucleic acid sequence encoding a crRNA sequence and a protein of the disclosure comprising a Cas protein. In one embodiment, the transfer plasmid comprises a nucleic acid sequence encoding a crRNA sequence and a protein of the disclosure comprising a Cas protein and a localization signal. In one embodiment, the transfer plasmid comprises a nucleic acid sequence encoding a crRNA sequence and a protein of the disclosure comprising a Cas protein and a NLS, NES or other localization signal.

[0191] For example, in one embodiment, the transfer plasmid comprises a nucleic acid sequence encoding a crRNA sequence having substantial complementary to a Coronavirus genomic mRNA sequence or a Coronavirus subgenomic mRNA sequence, and a nucleic acid sequence encoding Cas protein of the disclosure. In one embodiment, the nucleic acid sequence encoding a crRNA sequence having substantial complementary to a Coronavirus genomic mRNA sequence or a Coronavirus subgenomic mRNA sequence comprises a sequence at least 70%, at least 71%, at least 72%, at least 73%, at least 74%, at least 75%, at least 76%, at least 77%, at least 78%, at least 79%, at least 80%, at least 81%, at least 82%, at least 83%, at least 84%, at least 85%, at least 86%, at least 87%, at least 88%, at least 89%, at least 90%, at least 91%, at least 92%, at least 93%, at least 94%, at least 95%, at least 96%, at least 97%, at least 98%, or at least 99% homologous to SEQ ID NOs: 189-224. In one embodiment, nucleic acid sequence encoding Cas protein comprises a sequence encoding an amino acid sequence at least 70%, at least 71%, at least 72%, at least 73%, at least 74%, at least 75%, at least 76%, at least 77%, at least 78%, at least 79%, at least 80%, at least 81%, at least 82%, at least 83%, at least 84%, at least 85%, at least 86%, at least 87%, at least 88%, at least 89%, at least 90%, at least 91%, at least 92%, at least 93%, at least 94%, at least 95%, at least 96%, at least 97%, at least 98%, or at least 99% homologous to one of SEQ ID NOs: 1-47 and 68-100. In one embodiment, nucleic acid sequence encoding Cas protein comprises a sequence at least 70%, at least 71%, at least 72%, at least 73%, at least 74%, at least 75%, at least 76%, at least 77%, at least 78%, at least 79%, at least 80%, at least 81%, at least 82%, at least 83%, at least 84%, at least 85%, at least 86%, at least 87%, at least 88%, at least 89%, at least 90%, at least 91%, at least 92%, at least 93%, at least 94%, at least 95%, at least 96%, at least 97%, at least 98%, or at least 99% homologous to one of SEQ ID NOs: 132-133 and 147-166. In one embodiment, the transfer plasmid comprises a sequence of SEQ ID NOs: 280-282.

[0192] In one embodiment, the transfer plasmid comprises a nucleic acid sequence encoding a crRNA sequence having substantial complementary to an influenza virus genomic mRNA sequence or a subgenomic mRNA sequence, and a nucleic acid sequence encoding Cas protein of the disclosure. In one embodiment, the nucleic acid sequence encoding a crRNA sequence having substantial complementary to influenza virus genomic mRNA sequence or a subgenomic mRNA sequence encodes a sequence comprising a sequence at least 70%, at least 71%, at least 72%, at least 73%, at least 74%, at least 75%, at least 76%, at least 77%, at least 78%, at least 79%, at least 80%, at least 81%, at least 82%, at least 83%, at least 84%, at least 85%, at least 86%, at least 87%, at least 88%, at least 89%, at least 90%, at least 91%, at least 92%, at least 93%, at least 94%, at least 95%, at least 96%, at least 97%, at least 98%, or at least 99% homologous to SEQ ID NOs: 245-264. In one embodiment, nucleic acid sequence encoding Cas protein comprises a sequence encoding an amino acid sequence at least 70%, at least 71%, at least 72%, at least 73%, at least 74%, at least 75%, at least 76%, at least 77%, at least 78%, at least 79%, at least 80%, at least 81%, at least 82%, at least 83%, at least 84%, at least 85%, at least 86%, at least 87%, at least 88%, at least 89%, at least 90%, at least 91%, at least 92%, at least 93%, at least 94%, at least 95%, at least 96%, at least 97%, at least 98%, or at least 99% homologous to one of SEQ ID NOs: 1-47 and 68-100. In one embodiment, nucleic acid sequence encoding Cas protein comprises a sequence at least 70%, at least 71%, at least 72%, at least 73%, at least 74%, at least 75%, at least 76%, at least 77%, at least 78%, at least 79%, at least 80%, at least 81%, at least 82%, at least 83%, at least 84%, at least 85%, at least 86%, at least 87%, at least 88%, at least 89%, at least 90%, at least 91%, at least 92%, at least 93%, at least 94%, at least 95%, at least 96%, at least 97%, at least 98%, or at least 99% homologous to one of SEQ ID NOs: 132-133 and 147-166.

[0193] In one embodiment, the transfer plasmid comprises a nucleic acid sequence encoding a crRNA array sequence and Cas protein of the disclosure. For example, in one embodiment the transfer plasmid comprises a nucleic acid sequence encoding a crRNA array sequence and a protein of the disclosure comprising a Cas protein. In one embodiment, the transfer plasmid comprises a nucleic acid sequence encoding a crRNA array sequence and a protein of the disclosure comprising a Cas protein and a localization signal. In one embodiment, the transfer plasmid comprises a nucleic acid sequence encoding a crRNA array sequence and a protein of the disclosure comprising a Cas protein and a NLS, NES or other localization signal.

[0194] For example, in one embodiment, the transfer plasmid comprises a nucleic acid sequence encoding a tandem array comprising two or more crRNA sequence having substantial complementary to a Coronavirus genomic mRNA sequence or a Coronavirus subgenomic mRNA sequence, and a nucleic acid sequence encoding Cas protein of the disclosure. In one embodiment, the nucleic acid sequence encoding a tandem array comprises a sequence encoding a sequence at least 70%, at least 71%, at least 72%, at least 73%, at least 74%, at least 75%, at least 76%, at least 77%, at least 78%, at least 79%, at least 80%, at least 81%, at least 82%, at least 83%, at least 84%, at least 85%, at least 86%, at least 87%, at least 88%, at least 89%, at least 90%, at least 91%, at least 92%, at least 93%, at least 94%, at least 95%, at least 96%, at least 97%, at least 98%, or at least 99% homologous to SEQ ID NO: 275. In one embodiment, nucleic acid sequence encoding Cas protein comprises a sequence encoding an amino acid sequence at least 70%, at least 71%, at least 72%, at least 73%, at least 74%, at least 75%, at least 76%, at least 77%, at least 78%, at least 79%, at least 80%, at least 81%, at least 82%, at least 83%, at least 84%, at least 85%, at least 86%, at least 87%, at least 88%, at least 89%, at least 90%, at least 91%, at least 92%, at least 93%, at least 94%, at least 95%, at least 96%, at least 97%, at least 98%, or at least 99% homologous to one of SEQ ID NOs: 1-47 or 68-100. In one embodiment, nucleic acid sequence encoding Cas protein comprises a sequence at least 70%, at least 71%, at least 72%, at least 73%, at least 74%, at least 75%, at least 76%, at least 77%, at least 78%, at least 79%, at least 80%, at least 81%, at least 82%, at least 83%, at least 84%, at least 85%, at least 86%, at least 87%, at least 88%, at least 89%, at least 90%, at least 91%, at least 92%, at least 93%, at least 94%, at least 95%, at least 96%, at least 97%, at least 98%, or at least 99% homologous to one of SEQ ID NOs: 132-133 or 147-166. In one embodiment, the transfer plasmid comprises a sequence of SEQ ID NO:283.

[0195] In one embodiment, the transfer plasmid comprises a nucleic acid sequence encoding a tandem array comprising two or more crRNA sequence having substantial complementary to an influenza virus genomic mRNA sequence or a subgenomic mRNA sequence, and a nucleic acid sequence encoding Cas protein of the disclosure. In one embodiment, the nucleic acid sequence encoding a tandem array comprises a sequence encoding a sequence at least 70%, at least 71%, at least 72%, at least 73%, at least 74%, at least 75%, at least 76%, at least 77%, at least 78%, at least 79%, at least 80%, at least 81%, at least 82%, at least 83%, at least 84%, at least 85%, at least 86%, at least 87%, at least 88%, at least 89%, at least 90%, at least 91%, at least 92%, at least 93%, at least 94%, at least 95%, at least 96%, at least 97%, at least 98%, or at least 99% homologous to SEQ ID NOs: 276 or 277. In one embodiment, nucleic acid sequence encoding Cas protein comprises a sequence encoding an amino acid sequence at least 80% homologous to one of SEQ ID NOs: 1-47 and 68-100. In one embodiment, nucleic acid sequence encoding Cas protein comprises a sequence at least 70%, at least 71%, at least 72%, at least 73%, at least 74%, at least 75%, at least 76%, at least 77%, at least 78%, at least 79%, at least 80%, at least 81%, at least 82%, at least 83%, at least 84%, at least 85%, at least 86%, at least 87%, at least 88%, at least 89%, at least 90%, at least 91%, at least 92%, at least 93%, at least 94%, at least 95%, at least 96%, at least 97%, at least 98%, or at least 99% homologous to one of SEQ ID NOs: 132-133 or 147-166.

[0196] In one embodiment, the envelope plasmid comprises a nucleic acid sequence encoding an envelope protein. In one embodiment, the envelope protein can be selected based on the desired cell type. In one embodiment, the envelope plasmid comprises a nucleic acid sequence encoding an HIV envelope protein. In one embodiment, the envelope plasmid comprises a nucleic acid sequence encoding a vesicular stomatitis virus g-protein (VSV-g) envelope protein. In one embodiment, the envelope plasmid comprises a nucleic acid sequence encoding an amino acid sequence at least 70%, at least 71%, at least 72%, at least 73%, at least 74%, at least 75%, at least 76%, at least 77%, at least 78%, at least 79%, at least 80%, at least 81%, at least 82%, at least 83%, at least 84%, at least 85%, at least 86%, at least 87%, at least 88%, at least 89%, at least 90%, at least 91%, at least 92%, at least 93%, at least 94%, at least 95%, at least 96%, at least 97%, at least 98%, or at least 99% homologous to SEQ ID NO: 130. In one embodiment, the envelope plasmid comprises a nucleic acid sequence encoding an amino acid sequence of SEQ ID NO: 130.

[0197] In one embodiment, the envelope plasmid comprises a nucleic acid sequence encoding a coronavirus spike protein or a coronavirus spike protein-derived protein. For example in one embodiment, the envelope plasmid comprises a nucleic acid sequence encoding an amino acid sequence at least 70%, at least 71%, at least 72%, at least 73%, at least 74%, at least 75%, at least 76%, at least 77%, at least 78%, at least 79%, at least 80%, at least 81%, at least 82%, at least 83%, at least 84%, at least 85%, at least 86%, at least 87%, at least 88%, at least 89%, at least 90%, at least 91%, at least 92%, at least 93%, at least 94%, at least 95%, at least 96%, at least 97%, at least 98%, or at least 99% homologous to one of SEQ ID NOs:101-129. In one embodiment, the envelope plasmid comprises a nucleic acid sequence encoding an amino acid sequence of one of SEQ ID NOs: 101-129.

[0198] In one embodiment, viral envelope proteins from coronaviruses are not efficient for pseudotyping of lentiviral vectors. Thus, in one embodiment, the disclosure also provides novel coronavirus envelope proteins for use in pseudotyping a lentiviral vector. In one embodiment, the coronavirus envelope protein comprises an amino acid sequence at least 70%, at least 71%, at least 72%, at least 73%, at least 74%, at least 75%, at least 76%, at least 77%, at least 78%, at least 79%, at least 80%, at least 81%, at least 82%, at least 83%, at least 84%, at least 85%, at least 86%, at least 87%, at least 88%, at least 89%, at least 90%, at least 91%, at least 92%, at least 93%, at least 94%, at least 95%, at least 96%, at least 97%, at least 98%, or at least 99% homologous to one of SEQ ID NOs:101-129. In one embodiment, the coronavirus envelope protein comprises an amino acid sequence of one of SEQ ID NOs: 101-129.

[0199] In one embodiment, the VPR plasmid comprises a nucleic acid sequence encoding a fusion protein comprising VPR, and a Cas protein of the disclosure. In one embodiment, the VPR plasmid comprises a nucleic acid sequence encoding a fusion protein comprising VPR, and a protein of the disclosure comprising a Cas protein.

[0200] In one embodiment, the packaging plasmid, transfer plasmid, and envelope plasmid are introduced into a cell. In one embodiment, the cell transcribes and translates the nucleic acid sequence encoding the gag-pol protein encoded by the packaging plasmid to produce the gag-pol polyprotein. In one embodiment, the cell transcribes and translates the nucleic acid sequence encoding the envelope protein of the envelope plasmid to produce the envelope protein. In one embodiment, the cell transcribes the nucleic acid sequence encoding the crRNA sequence or crRNA array of the transfer plasmid to produce the crRNA or crRNA array. In one embodiment, the cell transcribes and translates the nucleic acid sequence encoding the Cas protein of the transfer plasmid to produce the Cas or Cas fusion protein.

[0201] In one embodiment, the transcribed transfer plasmid and gag-pol proteins are packaged into a lentiviral vector. In one embodiment, the lentiviral vectors are collected from the cell media. In one embodiment, the viral particles transduce a target cell, wherein the transcribed the crRNA and Cas protein are cleaved and the translated thereby generating the Cas protein and crRNA, wherein the crRNA binds to the Cas protein and directs it to an RNA having a sequence substantially complementary to the crRNA sequence.

[0202] In one embodiment, the packaging plasmid, transfer plasmid, and envelope plasmid are introduced into a cell. In one embodiment, the cell transcribes and translates the nucleic acid sequence encoding the gag-pol protein encoded by the packaging plasmid to produce the gag-pol polyprotein. In one embodiment, the cell transcribes and translates the nucleic acid sequence encoding the envelope protein of the envelope plasmid to produce the envelope protein. In one embodiment, the cell transcribes the nucleic acid sequence encoding the gene to produce the gene. In one embodiment, the cell transcribes and translates the nucleic acid sequence encoding the gene of the transfer plasmid to produce a protein.

[0203] In one embodiment, the transcribed transfer plasmid and gag-pol proteins are packaged into a lentiviral vector. In one embodiment, the lentiviral vectors are collected from the cell media. In one embodiment, the viral particles transduce a target cell, wherein the transcribed gene is delivered to the cell and inserted into the genome.

[0204] In one embodiment, the transcribed transfer plasmid and gag-pol proteins are packaged into a lentiviral vector. In one embodiment, the lentiviral vectors are collected from the cell media. In one embodiment, the viral particles transduce a target cell, wherein the transcribed and translated gene is delivered to the cell.

[0205] In one embodiment, the gene or protein is delivered to a respiratory, vascular, renal, or cardiovascular cell type. Thus, in one embodiment the envelope protein is derived from a coronavirus. In one embodiment, the coronavirus envelope protein comprises an amino acid sequence at least 70%, at least 71%, at least 72%, at least 73%, at least 74%, at least 75%, at least 76%, at least 77%, at least 78%, at least 79%, at least 80%, at least 81%, at least 82%, at least 83%, at least 84%, at least 85%, at least 86%, at least 87%, at least 88%, at least 89%, at least 90%, at least 91%, at least 92%, at least 93%, at least 94%, at least 95%, at least 96%, at least 97%, at least 98%, or at least 99% homologous to one of SEQ ID NOs: 101-129. In one embodiment, the coronavirus envelope protein comprises an amino acid sequence of one of SEQ ID NOs: 101-129.

[0206] Further, a number of additional viral based systems have been developed for gene transfer into mammalian cells. For example, retroviruses provide a convenient platform for gene delivery systems. A selected gene can be inserted into a vector and packaged in retroviral particles using techniques known in the art. The recombinant virus can then be isolated and delivered to cells of the subject either in vivo or ex vivo. A number of retroviral systems are known in the art. In some embodiments, adenovirus vectors are used. A number of adenovirus vectors are known in the art. In one embodiment, lentivirus vectors are used.

[0207] For example, vectors derived from retroviruses such as the lentivirus are suitable tools to achieve long-term gene transfer since they allow long-term, stable integration of a transgene and its propagation in daughter cells. Lentiviral vectors have the added advantage over vectors derived from onco-retroviruses such as murine leukemia viruses in that they can transduce non-proliferating cells, such as hepatocytes. They also have the added advantage of low immunogenicity.

[0208] In one embodiment, the composition includes a vector derived from an adeno-associated virus (AAV). The term “AAV vector” means a vector derived from an adeno-associated virus serotype, including without limitation, AAV-1, AAV-2, AAV-3, AAV-4, AAV-5, AAV-6, AAV-7, AAV-8, and AAV-9. AAV vectors have become powerful gene delivery tools for the treatment of various disorders. AAV vectors possess a number of features that render them ideally suited for gene therapy, including a lack of pathogenicity, minimal immunogenicity, and the ability to transduce postmitotic cells in a stable and efficient manner. Expression of a particular gene contained within an AAV vector can be specifically targeted to one or more types of cells by choosing the appropriate combination of AAV serotype, promoter, and delivery method.

[0209] For example, in one embodiment, the AAV vector comprises a crRNA having substantially complementary to a Coronavirus genomic mRNA sequence or a Coronavirus subgenomic mRNA sequence. In one embodiment, the AAV vector comprises a crRNA array comprising two or more crRNA having substantially complementary to a Coronavirus genomic mRNA sequence or a Coronavirus subgenomic mRNA sequence. In one embodiment, the AAV vector comprises a sequence at least 70%, at least 71%, at least 72%, at least 73%, at least 74%, at least 75%, at least 76%, at least 77%, at least 78%, at least 79%, at least 80%, at least 81%, at least 82%, at least 83%, at least 84%, at least 85%, at least 86%, at least 87%, at least 88%, at least 89%, at least 90%, at least 91%, at least 92%, at least 93%, at least 94%, at least 95%, at least 96%, at least 97%, at least 98%, or at least 99% homologous to SEQ ID NO: 284. In one embodiment, the transfer plasmid comprises a sequence of SEQ ID NO: 284.

[0210] In one embodiment, the AAV vector comprises a crRNA having substantially complementary to an influenza virus genomic RNA sequence or an influenza virus subgenomic RNA sequence. In one embodiment, the transfer plasmid comprises a crRNA array comprising two or more crRNA having substantially complementary to an influenza virus genomic RNA sequence or an influenza virus subgenomic RNA sequence.

[0211] AAV vectors can have one or more of the AAV wild-type genes deleted in whole or part, preferably the rep and/or cap genes, but retain functional flanking ITR sequences. Despite the high degree of homology, the different serotypes have tropisms for different tissues. The receptor for AAV1 is unknown; however, AAV1 is known to transduce skeletal and cardiac muscle more efficiently than AAV2. Since most of the studies have been done with pseudotyped vectors in which the vector DNA flanked with AAV2 ITR is packaged into capsids of alternate serotypes, it is clear that the biological differences are related to the capsid rather than to the genomes. Recent evidence indicates that DNA expression cassettes packaged in AAV 1 capsids are at least 1 log 10 more efficient at transducing cardiomyocytes than those packaged in AAV2 capsids. In one embodiment, the viral delivery system is an adeno-associated viral delivery system. The adeno-associated virus can be of serotype 1 (AAV 1), serotype 2 (AAV2), serotype 3 (AAV3), serotype 4 (AAV4), serotype 5 (AAV5), serotype 6 (AAV6), serotype 7 (AAV7), serotype 8 (AAV8), or serotype 9 (AAV9).

[0212] Desirable AAV fragments for assembly into vectors include the cap proteins, including the vp1, vp2, vp3 and hypervariable regions, the rep proteins, including rep 78, rep 68, rep 52, and rep 40, and the sequences encoding these proteins. These fragments may be readily utilized in a variety of vector systems and host cells. Such fragments may be used alone, in combination with other AAV serotype sequences or fragments, or in combination with elements from other AAV or non-AAV viral sequences. As used herein, artificial AAV serotypes include, without limitation, AAV with a non-naturally occurring capsid protein. Such an artificial capsid may be generated by any suitable technique, using a selected AAV sequence (e.g., a fragment of a vp1 capsid protein) in combination with heterologous sequences which may be obtained from a different selected AAV serotype, non-contiguous portions of the same AAV serotype, from a non-AAV viral source, or from a non-viral source. An artificial AAV serotype may be, without limitation, a chimeric AAV capsid, a recombinant AAV capsid, or a “humanized” AAV capsid. Thus exemplary AAVs, or artificial AAVs, suitable for expression of one or more proteins, include AAV2/8 (see U.S. Pat. No. 7,282,199), AAV2/5 (available from the National Institutes of Health), AAV2/9 (International Patent Publication No. WO2005/033321), AAV2/6 (U.S. Pat. No. 6,156,303), and AAVrh8 (International Patent Publication No. WO2003/042397), among others.

[0213] In certain embodiments, the vector also includes conventional control elements which are operably linked to the transgene in a manner which permits its transcription, translation and/or expression in a cell transfected with the plasmid vector or infected with the virus produced by the invention. As used herein, “operably linked” sequences include both expression control sequences that are contiguous with the gene of interest and expression control sequences that act in trans or at a distance to control the gene of interest. Expression control sequences include appropriate transcription initiation, termination, promoter and enhancer sequences; efficient RNA processing signals such as splicing and polyadenylation (polyA) signals; sequences that stabilize cytoplasmic mRNA; sequences that enhance translation efficiency (i.e., Kozak consensus sequence); sequences that enhance protein stability; and when desired, sequences that enhance secretion of the encoded product. A great number of expression control sequences, including promoters which are native, constitutive, inducible and/or tissue-specific, are known in the art and may be utilized.

[0214] Additional promoter elements, e.g., enhancers, regulate the frequency of transcriptional initiation. Typically, these are located in the region 30-110 bp upstream of the start site, although a number of promoters have recently been shown to contain functional elements downstream of the start site as well. The spacing between promoter elements frequently is flexible, so that promoter function is preserved when elements are inverted or moved relative to one another. In the thymidine kinase (tk) promoter, the spacing between promoter elements can be increased to 50 bp apart before activity begins to decline. Depending on the promoter, it appears that individual elements can function either cooperatively or independently to activate transcription.

[0215] One example of a suitable promoter is the immediate early cytomegalovirus (CMV) promoter sequence. This promoter sequence is a strong constitutive promoter sequence capable of driving high levels of expression of any polynucleotide sequence operatively linked thereto. Another example of a suitable promoter is Elongation Growth Factor-1α (EF-1α). However, other constitutive promoter sequences may also be used, including, but not limited to the simian virus 40 (SV40) early promoter, mouse mammary tumor virus (MMTV), human immunodeficiency virus (HIV) long terminal repeat (LTR) promoter, MoMuLV promoter, an avian leukemia virus promoter, an Epstein-Barr virus immediate early promoter, a Rous sarcoma virus promoter, as well as human gene promoters such as, but not limited to, the actin promoter, the myosin promoter, the hemoglobin promoter, and the creatine kinase promoter. Further, the invention should not be limited to the use of constitutive promoters. Inducible promoters are also contemplated as part of the invention. The use of an inducible promoter provides a molecular switch capable of turning on expression of the polynucleotide sequence which it is operatively linked when such expression is desired, or turning off the expression when expression is not desired. Examples of inducible promoters include, but are not limited to a metallothionine promoter, a glucocorticoid promoter, a progesterone promoter, and a tetracycline promoter.

[0216] Enhancer sequences found on a vector also regulates expression of the gene contained therein. Typically, enhancers are bound with protein factors to enhance the transcription of a gene. Enhancers may be located upstream or downstream of the gene it regulates. Enhancers may also be tissue-specific to enhance transcription in a specific cell or tissue type. In one embodiment, the vector of the present invention comprises one or more enhancers to boost transcription of the gene present within the vector.

[0217] In order to assess the expression of a fusion protein of the invention, the expression vector to be introduced into a cell can also contain either a selectable marker gene or a reporter gene or both to facilitate identification and selection of expressing cells from the population of cells sought to be transfected or infected through viral vectors. In other aspects, the selectable marker may be carried on a separate piece of DNA and used in a co-transfection procedure. Both selectable markers and reporter genes may be flanked with appropriate regulatory sequences to enable expression in the host cells. Useful selectable markers include, for example, antibiotic-resistance genes, such as neo and the like.

[0218] Reporter genes are used for identifying potentially transfected cells and for evaluating the functionality of regulatory sequences. In general, a reporter gene is a gene that is not present in or expressed by the recipient organism or tissue and that encodes a polypeptide whose expression is manifested by some easily detectable property, e.g., enzymatic activity. Expression of the reporter gene is assayed at a suitable time after the DNA has been introduced into the recipient cells. Suitable reporter genes may include genes encoding luciferase, beta-galactosidase, chloramphenicol acetyl transferase, secreted alkaline phosphatase, or the green fluorescent protein gene (e.g., Ui-Tei et al., 2000 FEBS Letters 479: 79-82). Suitable expression systems are well known and may be prepared using known techniques or obtained commercially. In general, the construct with the minimal 5′ flanking region showing the highest level of expression of reporter gene is identified as the promoter. Such promoter regions may be linked to a reporter gene and used to evaluate agents for the ability to modulate promoter-driven transcription.

[0219] Methods of introducing and expressing genes into a cell are known in the art. In the context of an expression vector, the vector can be readily introduced into a host cell, e.g., mammalian, bacterial, yeast, or insect cell by any method in the art. For example, the expression vector can be transferred into a host cell by physical, chemical, or biological means.

[0220] Physical methods for introducing a polynucleotide into a host cell include calcium phosphate precipitation, lipofection, particle bombardment, microinjection, electroporation, and the like. Methods for producing cells comprising vectors and/or exogenous nucleic acids are well-known in the art. See, for example, Sambrook et al. (2012, Molecular Cloning: A Laboratory Manual, Cold Spring Harbor Laboratory, New York). An exemplary method for the introduction of a polynucleotide into a host cell is calcium phosphate transfection.

[0221] Biological methods for introducing a polynucleotide of interest into a host cell include the use of DNA and RNA vectors. Viral vectors, and especially retroviral vectors, have become the most widely used method for inserting genes into mammalian, e.g., human cells. Other viral vectors can be derived from lentivirus, poxviruses, herpes simplex virus I, adenoviruses and adeno-associated viruses, and the like. See, for example, U.S. Pat. Nos. 5,350,674 and 5,585,362.

[0222] Chemical means for introducing a polynucleotide into a host cell include colloidal dispersion systems, such as macromolecule complexes, nanocapsules, microspheres, beads, and lipid-based systems including oil-in-water emulsions, micelles, mixed micelles, and liposomes. An exemplary colloidal system for use as a delivery vehicle in vitro and in vivo is a liposome (e.g., an artificial membrane vesicle).

[0223] In the case where a non-viral delivery system is utilized, an exemplary delivery vehicle is a liposome. The use of lipid formulations is contemplated for the introduction of the nucleic acids into a host cell (in vitro, ex vivo or in vivo). In another aspect, the nucleic acid may be associated with a lipid. The nucleic acid associated with a lipid may be encapsulated in the aqueous interior of a liposome, interspersed within the lipid bilayer of a liposome, attached to a liposome via a linking molecule that is associated with both the liposome and the oligonucleotide, entrapped in a liposome, complexed with a liposome, dispersed in a solution containing a lipid, mixed with a lipid, combined with a lipid, contained as a suspension in a lipid, contained or complexed with a micelle, or otherwise associated with a lipid. Lipid, lipid/DNA or lipid/expression vector associated compositions are not limited to any particular structure in solution. For example, they may be present in a bilayer structure, as micelles, or with a “collapsed” structure. They may also simply be interspersed in a solution, possibly forming aggregates that are not uniform in size or shape. Lipids are fatty substances which may be naturally occurring or synthetic lipids. For example, lipids include the fatty droplets that naturally occur in the cytoplasm as well as the class of compounds which contain long-chain aliphatic hydrocarbons and their derivatives, such as fatty acids, alcohols, amines, amino alcohols, and aldehydes.

[0224] Lipids suitable for use can be obtained from commercial sources. For example, dimyristyl phosphatidylcholine (“DMPC”) can be obtained from Sigma, St. Louis, MO; dicetyl phosphate (“DCP”) can be obtained from K & K Laboratories (Plainview, NY); cholesterol (“Choi”) can be obtained from Calbiochem-Behring; dimyristyl phosphatidylglycerol (“DMPG”) and other lipids may be obtained from Avanti Polar Lipids, Inc. (Birmingham, AL). Stock solutions of lipids in chloroform or chloroform/methanol can be stored at about −20° C. Chloroform is used as the only solvent since it is more readily evaporated than methanol. “Liposome” is a generic term encompassing a variety of single and multilamellar lipid vehicles formed by the generation of enclosed lipid bilayers or aggregates. Liposomes can be characterized as having vesicular structures with a phospholipid bilayer membrane and an inner aqueous medium. Multilamellar liposomes have multiple lipid layers separated by aqueous medium. They form spontaneously when phospholipids are suspended in an excess of aqueous solution. The lipid components undergo self-rearrangement before the formation of closed structures and entrap water and dissolved solutes between the lipid bilayers (Ghosh et al., 1991 Glycobiology 5: 505-10). However, compositions that have different structures in solution than the normal vesicular structure are also encompassed. For example, the lipids may assume a micellar structure or merely exist as nonuniform aggregates of lipid molecules. Also contemplated are lipofectamine-nucleic acid complexes.

[0225] Regardless of the method used to introduce exogenous nucleic acids into a host cell, in order to confirm the presence of the recombinant DNA sequence in the host cell, a variety of assays may be performed. Such assays include, for example, “molecular biological” assays well known to those of skill in the art, such as Southern and Northern blotting, RT-PCR and PCR; “biochemical” assays, such as detecting the presence or absence of a particular peptide, e.g., by immunological means (ELISAs and Western blots) or by assays described herein to identify agents falling within the scope of the invention.

### Systems

[0226] In one aspect, the present invention provides a system for decreasing the number of an RNA transcript in a subject. In one embodiment the system comprises, in one or more vectors, a nucleic acid sequence encoding a protein, wherein the protein comprises a CRISPR-associated (Cas) protein, and optionally a localization sequence, such as an NLS, NES, or organelle localization signal; and a nucleic acid sequence encoding a crRNA. In one embodiment, the crRNA substantially hybridizes to a target RNA sequence in the RNA transcript. In one embodiment, the nucleic acid sequence encoding the Cas and the nucleic acid sequence encoding a crRNA are in the same vector. In one embodiment, the nucleic acid sequence encoding the protein and the nucleic acid sequence encoding a crRNA are in different vectors.

[0227] In one embodiment, the nucleic acid sequence encoding a protein comprises (1) a nucleic acid sequence encoding an amino acid sequence at least 70%, at least 71%, at least 72%, at least 73%, at least 74%, at least 75%, at least 76%, at least 77%, at least 78%, at least 79%, at least 80%, at least 81%, at least 82%, at least 83%, at least 84%, at least 85%, at least 86%, at least 87%, at least 88%, at least 89%, at least 90%, at least 91%, at least 92%, at least 93%, at least 94%, at least 95%, at least 96%, at least 97%, at least 98%, or at least 99% identical to one of SEQ ID NOs: 1-47; and (2) optionally a nucleic acid sequence encoding an amino acid sequence at least 70%, at least 71%, at least 72%, at least 73%, at least 74%, at least 75%, at least 76%, at least 77%, at least 78%, at least 79%, at least 80%, at least 81%, at least 82%, at least 83%, at least 84%, at least 85%, at least 86%, at least 87%, at least 88%, at least 89%, at least 90%, at least 91%, at least 92%, at least 93%, at least 94%, at least 95%, at least 96%, at least 97%, at least 98%, or at least 99% identical to one of SEQ ID NOs: 50-66 and 298-910. In one embodiment, the nucleic acid sequence encoding a protein comprises (1) a nucleic acid sequence encoding an amino acid of one of SEQ ID NOs: 1-47; and (2) optionally a nucleic acid sequence encoding an amino acid of one of SEQ ID NOs: 50-66 and 298-910. In one embodiment, the nucleic acid sequence encoding a protein comprises a nucleic acid sequence encoding an amino acid at least 70%, at least 71%, at least 72%, at least 73%, at least 74%, at least 75%, at least 76%, at least 77%, at least 78%, at least 79%, at least 80%, at least 81%, at least 82%, at least 83%, at least 84%, at least 85%, at least 86%, at least 87%, at least 88%, at least 89%, at least 90%, at least 91%, at least 92%, at least 93%, at least 94%, at least 95%, at least 96%, at least 97%, at least 98%, or at least 99% identical to one of SEQ ID NOs: 68-100. In one embodiment, the nucleic acid sequence encoding a protein comprises a nucleic acid sequence encoding an amino acid of one of SEQ ID NOs: 68-100.

### Compositions and Formulations

[0228] In one aspect, the present invention provides compositions for decreasing the number of an RNA transcript in a subject. In one embodiment, the composition comprises a fusion protein, wherein the fusion protein comprises a CRISPR-associated (Cas) protein, and optionally a localization sequence, such as an NLS, NES or organelle localization signal. In one embodiment, the composition comprises a crRNA. In one embodiment, the crRNA substantially hybridizes to a target RNA sequence in the RNA transcript. In one embodiment, the composition comprises a crRNA array. In one embodiment, the crRNA array comprises two or more sequences which substantially hybridizes to a target RNA sequence in the RNA transcript.

[0229] In one embodiment, the composition comprises a protein comprising (1) an amino acid sequence at least 70%, at least 71%, at least 72%, at least 73%, at least 74%, at least 75%, at least 76%, at least 77%, at least 78%, at least 79%, at least 80%, at least 81%, at least 82%, at least 83%, at least 84%, at least 85%, at least 86%, at least 87%, at least 88%, at least 89%, at least 90%, at least 91%, at least 92%, at least 93%, at least 94%, at least 95%, at least 96%, at least 97%, at least 98%, or at least 99% identical to one of SEQ ID NOs: 1-47; and (2) optionally an amino acid sequence at least 70%, at least 71%, at least 72%, at least 73%, at least 74%, at least 75%, at least 76%, at least 77%, at least 78%, at least 79%, at least 80%, at least 81%, at least 82%, at least 83%, at least 84%, at least 85%, at least 86%, at least 87%, at least 88%, at least 89%, at least 90%, at least 91%, at least 92%, at least 93%, at least 94%, at least 95%, at least 96%, at least 97%, at least 98%, or at least 99% identical to one of SEQ ID NOs: 50-66 and 298-910. In one embodiment, composition comprises a protein comprising (1) an amino acid of one of SEQ ID NOs: 1-47; and (2) optionally an amino acid of one of SEQ ID NOs: 50-66 and 298-910.

[0230] In one embodiment, composition comprises a protein comprising an amino acid sequence at least 70%, at least 71%, at least 72%, at least 73%, at least 74%, at least 75%, at least 76%, at least 77%, at least 78%, at least 79%, at least 80%, at least 81%, at least 82%, at least 83%, at least 84%, at least 85%, at least 86%, at least 87%, at least 88%, at least 89%, at least 90%, at least 91%, at least 92%, at least 93%, at least 94%, at least 95%, at least 96%, at least 97%, at least 98%, or at least 99% identical to one of SEQ ID NOs: 68-100. In one embodiment, the nucleic acid sequence encoding a protein comprises a protein comprising an amino acid sequence of one of SEQ ID NOs: 68-100.

[0231] The disclosure also encompasses the use of pharmaceutical compositions of the disclosure to practice the methods of the disclosure. Such a pharmaceutical composition may consist of at least one modulator (e.g., inhibitor or activator) composition of the invention or a salt thereof in a form suitable for administration to a subject, or the pharmaceutical composition may comprise at least one modulator (e.g., inhibitor or activator) composition of the invention or a salt thereof, and one or more pharmaceutically acceptable carriers, one or more additional ingredients, or some combination of these. The compound of the invention may be present in the pharmaceutical composition in the form of a physiologically acceptable salt, such as in combination with a physiologically acceptable cation or anion, as is well known in the art.

[0232] In an embodiment, the pharmaceutical compositions useful for practicing the methods of the invention may be administered to deliver a dose of between 1 ng/kg/day and 100 mg/kg/day. In another embodiment, the pharmaceutical compositions useful for practicing the invention may be administered to deliver a dose of between 1 ng/kg/day and 500 mg/kg/day.

[0233] The relative amounts of the active ingredient, the pharmaceutically acceptable carrier, and any additional ingredients in a pharmaceutical composition of the invention will vary, depending upon the identity, size, and condition of the subject treated and further depending upon the route by which the composition is to be administered. By way of example, the composition may comprise between 0.10% and 100% (w/w) active ingredient.

[0234] Pharmaceutical compositions that are useful in the methods of the invention may be suitably developed for oral, rectal, vaginal, parenteral, topical, pulmonary, intranasal, buccal, ophthalmic, or another route of administration. A composition useful within the methods of the invention may be directly administered to the skin, or any other tissue of a mammal. Other contemplated formulations include liposomal preparations, resealed erythrocytes containing the active ingredient, and immunologically-based formulations. The route(s) of administration will be readily apparent to the skilled artisan and will depend upon any number of factors including the type and severity of the disease being treated, the type and age of the veterinary or human subject being treated, and the like.

[0235] The formulations of the pharmaceutical compositions described herein may be prepared by any method known or hereafter developed in the art of pharmacology. In general, such preparatory methods include the step of bringing the active ingredient into association with a carrier or one or more other accessory ingredients, and then, if necessary or desirable, shaping or packaging the product into a desired single- or multi-dose unit.

[0236] As used herein, a “unit dose” is a discrete amount of the pharmaceutical composition comprising a predetermined amount of the active ingredient. The amount of the active ingredient is generally equal to the dosage of the active ingredient that would be administered to a subject or a convenient fraction of such a dosage such as, for example, one-half or one-third of such a dosage. The unit dosage form may be for a single daily dose or one of multiple daily doses (e.g., about 1 to 4 or more times per day). When multiple daily doses are used, the unit dosage form may be the same or different for each dose.

[0237] In one embodiment, the compositions of the invention are formulated using one or more pharmaceutically acceptable excipients or carriers. In one embodiment, the pharmaceutical compositions of the invention comprise a therapeutically effective amount of a compound or conjugate of the invention and a pharmaceutically acceptable carrier. Pharmaceutically acceptable carriers that are useful, include, but are not limited to, glycerol, water, saline, ethanol and other pharmaceutically acceptable salt solutions such as phosphates and salts of organic acids. Examples of these and other pharmaceutically acceptable carriers are described in Remington's Pharmaceutical Sciences (1991, Mack Publication Co., New Jersey).

[0238] The carrier may be a solvent or dispersion medium containing, for example, water, ethanol, polyol (for example, glycerol, propylene glycol, and liquid polyethylene glycol, and the like), suitable mixtures thereof, and vegetable oils. The proper fluidity may be maintained, for example, by the use of a coating such as lecithin, by the maintenance of the required particle size in the case of dispersion and by the use of surfactants. Prevention of the action of microorganisms may be achieved by various antibacterial and antifungal agents, for example, parabens, chlorobutanol, phenol, ascorbic acid, thimerosal, and the like. In many cases, isotonic agents, for example, sugars, sodium chloride, or polyalcohols such as mannitol and sorbitol are included in the composition. Prolonged absorption of the injectable compositions may be brought about by including in the composition an agent that delays absorption, for example, aluminum monostearate or gelatin. In one embodiment, the pharmaceutically acceptable carrier is not DMSO alone.

[0239] Formulations may be employed in admixtures with conventional excipients, i.e., pharmaceutically acceptable organic or inorganic carrier substances suitable for oral, vaginal, parenteral, nasal, intravenous, subcutaneous, enteral, or any other suitable mode of administration, known to the art. The pharmaceutical preparations may be sterilized and if desired mixed with auxiliary agents, e.g., lubricants, preservatives, stabilizers, wetting agents, emulsifiers, salts for influencing osmotic pressure buffers, coloring, flavoring and/or aromatic substances and the like. They may also be combined where desired with other active agents, e.g., other analgesic agents.

[0240] As used herein, “additional ingredients” include, but are not limited to, one or more of the following: excipients; surface active agents; dispersing agents; inert diluents; granulating and disintegrating agents; binding agents; lubricating agents; sweetening agents; flavoring agents; coloring agents; preservatives; physiologically degradable compositions such as gelatin; aqueous vehicles and solvents; oily vehicles and solvents; suspending agents; dispersing or wetting agents; emulsifying agents, demulcents; buffers; salts; thickening agents; fillers; emulsifying agents; antioxidants; antibiotics; antifungal agents; stabilizing agents; and pharmaceutically acceptable polymeric or hydrophobic materials. Other “additional ingredients” that may be included in the pharmaceutical compositions of the invention are known in the art and described, for example in Genaro, ed. (1985, Remington's Pharmaceutical Sciences, Mack Publishing Co., Easton, PA), which is incorporated herein by reference.

[0241] The composition of the invention may comprise a preservative from about 0.005% to 2.0% by total weight of the composition. The preservative is used to prevent spoilage in the case of exposure to contaminants in the environment. Examples of preservatives useful in accordance with the invention included but are not limited to those selected from the group consisting of benzyl alcohol, sorbic acid, parabens, imidurea and combinations thereof. An exemplary preservative is a combination of about 0.5% to 2.0% benzyl alcohol and 0.05% to 0.5% sorbic acid.

[0242] In one embodiment, the composition includes an anti-oxidant and a chelating agent that inhibits the degradation of the compound. Exemplary antioxidants for some compounds are BHT, BHA, alpha-tocopherol and ascorbic acid in the range of about 0.01% to 0.3% and BHT in the range of 0.03% to 0.1% by weight by total weight of the composition. In one embodiment, the chelating agent is present in an amount of from 0.01% to 0.5% by weight by total weight of the composition. Exemplary chelating agents include edetate salts (e.g. disodium edetate) and citric acid in the weight range of about 0.01% to 0.20%. In some embodiments, the chelating agent is in the range of 0.02% to 0.10% by weight by total weight of the composition. The chelating agent is useful for chelating metal ions in the composition that may be detrimental to the shelf life of the formulation. While BHT and disodium edetate are exemplary antioxidants and chelating agent respectively for some compounds, other suitable and equivalent antioxidants and chelating agents may be substituted therefore as would be known to those skilled in the art.

[0243] Liquid suspensions may be prepared using conventional methods to achieve suspension of the active ingredient in an aqueous or oily vehicle. Aqueous vehicles include, for example, water, and isotonic saline. Oily vehicles include, for example, almond oil, oily esters, ethyl alcohol, vegetable oils such as arachis, olive, sesame, or coconut oil, fractionated vegetable oils, and mineral oils such as liquid paraffin. Liquid suspensions may further comprise one or more additional ingredients including, but not limited to, suspending agents, dispersing or wetting agents, emulsifying agents, demulcents, preservatives, buffers, salts, flavorings, coloring agents, and sweetening agents. Oily suspensions may further comprise a thickening agent. Known suspending agents include, but are not limited to, sorbitol syrup, hydrogenated edible fats, sodium alginate, polyvinylpyrrolidone, gum tragacanth, gum acacia, and cellulose derivatives such as sodium carboxymethylcellulose, methylcellulose, hydroxypropylmethylcellulose. Known dispersing or wetting agents include, but are not limited to, naturally-occurring phosphatides such as lecithin, condensation products of an alkylene oxide with a fatty acid, with a long chain aliphatic alcohol, with a partial ester derived from a fatty acid and a hexitol, or with a partial ester derived from a fatty acid and a hexitol anhydride (e.g., polyoxyethylene stearate, heptadecaethyleneoxycetanol, polyoxyethylene sorbitol monooleate, and polyoxyethylene sorbitan monooleate, respectively). Known emulsifying agents include, but are not limited to, lecithin, and acacia. Known preservatives include, but are not limited to, methyl, ethyl, or n-propyl-para-hydroxybenzoates, ascorbic acid, and sorbic acid. Known sweetening agents include, for example, glycerol, propylene glycol, sorbitol, sucrose, and saccharin. Known thickening agents for oily suspensions include, for example, beeswax, hard paraffin, and cetyl alcohol.

[0244] Liquid solutions of the active ingredient in aqueous or oily solvents may be prepared in substantially the same manner as liquid suspensions, the primary difference being that the active ingredient is dissolved, rather than suspended in the solvent. As used herein, an “oily” liquid is one which comprises a carbon-containing liquid molecule and which exhibits a less polar character than water. Liquid solutions of the pharmaceutical composition of the invention may comprise each of the components described with regard to liquid suspensions, it being understood that suspending agents will not necessarily aid dissolution of the active ingredient in the solvent. Aqueous solvents include, for example, water, and isotonic saline. Oily solvents include, for example, almond oil, oily esters, ethyl alcohol, vegetable oils such as arachis, olive, sesame, or coconut oil, fractionated vegetable oils, and mineral oils such as liquid paraffin.

[0245] Powdered and granular formulations of a pharmaceutical preparation of the invention may be prepared using known methods. Such formulations may be administered directly to a subject, used, for example, to form tablets, to fill capsules, or to prepare an aqueous or oily suspension or solution by addition of an aqueous or oily vehicle thereto. Each of these formulations may further comprise one or more of dispersing or wetting agent, a suspending agent, and a preservative. Additional excipients, such as fillers and sweetening, flavoring, or coloring agents, may also be included in these formulations.

[0246] A pharmaceutical composition of the invention may also be prepared, packaged, or sold in the form of oil-in-water emulsion or a water-in-oil emulsion. The oily phase may be a vegetable oil such as olive or arachis oil, a mineral oil such as liquid paraffin, or a combination of these. Such compositions may further comprise one or more emulsifying agents such as naturally occurring gums such as gum acacia or gum tragacanth, naturally-occurring phosphatides such as soybean or lecithin phosphatide, esters or partial esters derived from combinations of fatty acids and hexitol anhydrides such as sorbitan monooleate, and condensation products of such partial esters with ethylene oxide such as polyoxyethylene sorbitan monooleate. These emulsions may also contain additional ingredients including, for example, sweetening or flavoring agents.

[0247] Methods for impregnating or coating a material with a chemical composition are known in the art, and include, but are not limited to methods of depositing or binding a chemical composition onto a surface, methods of incorporating a chemical composition into the structure of a material during the synthesis of the material (i.e., such as with a physiologically degradable material), and methods of absorbing an aqueous or oily solution or suspension into an absorbent material, with or without subsequent drying.

[0248] The regimen of administration may affect what constitutes an effective amount. The therapeutic formulations may be administered to the subject either prior to or after a diagnosis of disease. Further, several divided dosages, as well as staggered dosages may be administered daily or sequentially, or the dose may be continuously infused, or may be a bolus injection. Further, the dosages of the therapeutic formulations may be proportionally increased or decreased as indicated by the exigencies of the therapeutic or prophylactic situation.

[0249] Administration of the compositions of the present invention to a subject, include a mammal, for example a human, may be carried out using known procedures, at dosages and for periods of time effective to prevent or treat disease. An effective amount of the therapeutic compound necessary to achieve a therapeutic effect may vary according to factors such as the activity of the particular compound employed; the time of administration; the rate of excretion of the compound; the duration of the treatment; other drugs, compounds or materials used in combination with the compound; the state of the disease or disorder, age, sex, weight, condition, general health and prior medical history of the subject being treated, and like factors well-known in the medical arts. Dosage regimens may be adjusted to provide the optimum therapeutic response. For example, several divided doses may be administered daily, or the dose may be proportionally reduced as indicated by the exigencies of the therapeutic situation. A non-limiting example of an effective dose range for a therapeutic compound of the invention is from about 1 and 5,000 mg/kg of body weight/per day. One of ordinary skill in the art would be able to study the relevant factors and make the determination regarding the effective amount of the therapeutic compound without undue experimentation.

[0250] The compound may be administered to a subject as frequently as several times daily, or it may be administered less frequently, such as once a day, once a week, once every two weeks, once a month, or even less frequently, such as once every several months or even once a year or less. It is understood that the amount of compound dosed per day may be administered, in non-limiting examples, every day, every other day, every 2 days, every 3 days, every 4 days, or every 5 days. For example, with every other day administration, a 5 mg per day dose may be initiated on Monday with a first subsequent 5 mg per day dose administered on Wednesday, a second subsequent 5 mg per day dose administered on Friday, and so on. The frequency of the dose will be readily apparent to the skilled artisan and will depend upon any number of factors, such as, but not limited to, the type and severity of the disease being treated, the type and age of the animal, etc.

[0251] Actual dosage levels of the active ingredients in the pharmaceutical compositions of this invention may be varied so as to obtain an amount of the active ingredient that is effective to achieve the desired therapeutic response for a particular subject, composition, and mode of administration, without being toxic to the subject.

[0252] A medical doctor, e.g., physician or veterinarian, having ordinary skill in the art may readily determine and prescribe the effective amount of the pharmaceutical composition required. For example, the physician or veterinarian could start doses of the compounds of the invention employed in the pharmaceutical composition at levels lower than that required in order to achieve the desired therapeutic effect and gradually increase the dosage until the desired effect is achieved.

[0253] In particular embodiments, it is especially advantageous to formulate the compound in dosage unit form for ease of administration and uniformity of dosage. Dosage unit form as used herein refers to physically discrete units suited as unitary dosages for the subjects to be treated; each unit containing a predetermined quantity of therapeutic compound calculated to produce the desired therapeutic effect in association with the required pharmaceutical vehicle. The dosage unit forms of the invention are dictated by and directly dependent on (a) the unique characteristics of the therapeutic compound and the particular therapeutic effect to be achieved, and (b) the limitations inherent in the art of compounding/formulating such a therapeutic compound for the treatment of a disease in a subject.

[0254] In one embodiment, the compositions of the invention are administered to the subject in dosages that range from one to five times per day or more. In another embodiment, the compositions of the invention are administered to the subject in range of dosages that include, but are not limited to, once every day, every two, days, every three days to once a week, and once every two weeks. It will be readily apparent to one skilled in the art that the frequency of administration of the various combination compositions of the invention will vary from subject to subject depending on many factors including, but not limited to, age, disease or disorder to be treated, gender, overall health, and other factors. Thus, the invention should not be construed to be limited to any particular dosage regime and the precise dosage and composition to be administered to any subject will be determined by the attending physical taking all other factors about the subject into account.

[0255] Compounds of the invention for administration may be in the range of from about 1 mg to about 10,000 mg, about 20 mg to about 9,500 mg, about 40 mg to about 9,000 mg, about 75 mg to about 8,500 mg, about 150 mg to about 7,500 mg, about 200 mg to about 7,000 mg, about 3050 mg to about 6,000 mg, about 500 mg to about 5,000 mg, about 750 mg to about 4,000 mg, about 1 mg to about 3,000 mg, about 10 mg to about 2,500 mg, about 20 mg to about 2,000 mg, about 25 mg to about 1,500 mg, about 50 mg to about 1,000 mg, about 75 mg to about 900 mg, about 100 mg to about 800 mg, about 250 mg to about 750 mg, about 300 mg to about 600 mg, about 400 mg to about 500 mg, and any and all whole or partial increments there between.

[0256] In some embodiments, the dose of a compound of the invention is from about 1 mg and about 2,500 mg. In some embodiments, a dose of a compound of the invention used in compositions described herein is less than about 10,000 mg, or less than about 8,000 mg, or less than about 6,000 mg, or less than about 5,000 mg, or less than about 3,000 mg, or less than about 2,000 mg, or less than about 1,000 mg, or less than about 500 mg, or less than about 200 mg, or less than about 50 mg. Similarly, in some embodiments, a dose of a second compound (i.e., a drug used for treating the same or another disease as that treated by the compositions of the invention) as described herein is less than about 1,000 mg, or less than about 800 mg, or less than about 600 mg, or less than about 500 mg, or less than about 400 mg, or less than about 300 mg, or less than about 200 mg, or less than about 100 mg, or less than about 50 mg, or less than about 40 mg, or less than about 30 mg, or less than about 25 mg, or less than about 20 mg, or less than about 15 mg, or less than about 10 mg, or less than about 5 mg, or less than about 2 mg, or less than about 1 mg, or less than about 0.5 mg, and any and all whole or partial increments thereof.

[0257] In one embodiment, the present invention is directed to a packaged pharmaceutical composition comprising a container holding a therapeutically effective amount of a compound or conjugate of the invention, alone or in combination with a second pharmaceutical agent; and instructions for using the compound or conjugate to treat, prevent, or reduce one or more symptoms of a disease in a subject.

[0258] The term “container” includes any receptacle for holding the pharmaceutical composition. For example, in one embodiment, the container is the packaging that contains the pharmaceutical composition. In other embodiments, the container is not the packaging that contains the pharmaceutical composition, i.e., the container is a receptacle, such as a box or vial that contains the packaged pharmaceutical composition or unpackaged pharmaceutical composition and the instructions for use of the pharmaceutical composition. Moreover, packaging techniques are well known in the art. It should be understood that the instructions for use of the pharmaceutical composition may be contained on the packaging containing the pharmaceutical composition, and as such the instructions form an increased functional relationship to the packaged product. However, it should be understood that the instructions may contain information pertaining to the compound's ability to perform its intended function, e.g., treating or preventing a disease in a subject, or delivering an imaging or diagnostic agent to a subject.

[0259] Routes of administration of any of the compositions of the invention include oral, nasal, parenteral, sublingual, transdermal, transmucosal (e.g., sublingual, lingual, (trans)buccal, and (intra)nasal,), intravesical, intraduodenal, intragastrical, rectal, intra-peritoneal, subcutaneous, intramuscular, intradermal, intra-arterial, intravenous, or administration.

[0260] Suitable compositions and dosage forms include, for example, tablets, capsules, caplets, pills, gel caps, troches, dispersions, suspensions, solutions, syrups, granules, beads, transdermal patches, gels, powders, pellets, magmas, lozenges, creams, pastes, plasters, lotions, discs, suppositories, liquid sprays for nasal or oral administration, dry powder or aerosolized formulations for inhalation, compositions and formulations for intravesical administration and the like. It should be understood that the formulations and compositions that would be useful in the present invention are not limited to the particular formulations and compositions that are described herein.

### Methods of Decreasing Viral RNA & Methods of Treatment

[0261] In one aspect, the disclosure provides methods of decreasing the number of an RNA in a subject. For example, in one embodiment, the methods decrease the number of a viral RNA in a subject. In one embodiment, viral RNA is localized in the cytoplasm In one embodiment, the viral RNA is localized in the nucleus. In one embodiment, viral RNA is localized in an organelle. For example, in one embodiment, the methods decrease viral RNA localized in the nucleolus, ribosome, vesicle, rough endoplasmic reticulum, Golgi apparatus, cytoskeleton, smooth endoplasmic reticulum, mitochondria, vacuole, cytosol, lysosome, or centriole. In one embodiment, the methods decrease cell-membrane associated viral RNA. In one embodiment, the methods decrease extracellular viral RNA.

[0262] In one embodiment, the method comprises administering to the subject (1) a nucleic acid molecule encoding a fusion protein of the disclosure comprising a Cas protein and optionally a localization sequence, such as an NLS, NES or organelle localization signal, or a fusion protein of the disclosure comprising a Cas protein and optionally a localization sequence, such as an NLS, NES, or organelle localization signal; and (2) a nucleic acid molecule encoding a crRNA or crRNA array comprising a targeting nucleotide sequence complimentary to a target RNA sequence in the RNA or a crRNA or crRNA array comprising a targeting nucleotide sequence complimentary to a target RNA sequence in the RNA.

[0263] In one embodiment, the method comprises administering to the subject (1) a nucleic acid molecule encoding a fusion protein of the disclosure comprising a Cas protein and optionally a localization sequence, such as an NLS, NES or organelle localization signal; and (2) a nucleic acid molecule encoding a crRNA or crRNA array comprising a targeting nucleotide sequence complimentary to a target RNA sequence in the RNA or a crRNA or crRNA array comprising a targeting nucleotide sequence complimentary to a target RNA sequence in the RNA.

[0264] In one embodiment, the method comprises administering to the subject (1) a fusion protein of the disclosure comprising a Cas protein and optionally a localization sequence, such as an NLS, NES or organelle localization signal; and (2) a nucleic acid molecule encoding a crRNA or crRNA array comprising a targeting nucleotide sequence complimentary to a target RNA sequence in the RNA or a crRNA or crRNA array comprising a targeting nucleotide sequence complimentary to a target RNA sequence in the RNA.

[0265] In some embodiments, the RNA cytoplasmic. In such embodiments, the method comprises administering to the subject (1) a protein of the disclosure comprising a Cas protein or a nucleic acid molecule encoding a protein of the disclosure comprising a Cas protein; and (2) a nucleic acid molecule encoding a crRNA comprising a targeting nucleotide sequence complimentary to a target RNA sequence, or a crRNA comprising a targeting nucleotide sequence complimentary to a target RNA sequence.

[0266] In some embodiments, the RNA cytoplasmic. In such embodiments, the method comprises administering to the subject (1) a protein of the disclosure comprising a Cas protein and a NES or a nucleic acid molecule encoding a protein of the disclosure comprising a Cas protein and a NES; and (2) a nucleic acid molecule encoding a crRNA comprising a targeting nucleotide sequence complimentary to a target RNA sequence, or a crRNA comprising a targeting nucleotide sequence complimentary to a target RNA sequence

[0267] In some embodiments, the RNA nuclear. In such embodiments, the method comprises administering to the subject (1) a protein of the disclosure comprising a Cas protein and a NLS or a nucleic acid molecule encoding a protein of the disclosure comprising a Cas protein and a NLS; and (2) a nucleic acid molecule encoding a crRNA comprising a targeting nucleotide sequence complimentary to a target RNA sequence, or a crRNA comprising a targeting nucleotide sequence complimentary to a target RNA sequence

[0268] In one embodiment, the subject is a cell. In one embodiment, the cell is a prokaryotic cell or eukaryotic cell. In one embodiment, the cell is a eukaryotic cell. In one embodiment, the cell is a plant, animal, or fungi cell. In one embodiment, the cell is a plant cell. In one embodiment, the cell is an animal cell. In one embodiment, the cell is a yeast cell.

[0269] In one embodiment, the subject is a mammal. For example, in one embodiment, the subject is a human, non-human primate, dog, cat, horse, cow, goat, sheep, rabbit, pig, rat, or mouse. In one embodiment, the subject is a non-mammalian subject. For example, in one embodiment, the subject is a zebrafish, fruit fly, or roundworm.

[0270] In one embodiment, the amount of viral RNA is reduced in vitro. In one embodiment, the amount of viral RNA is reduced in vivo.

[0271] In one aspect, the present invention provides methods cleaving of a target viral RNA in a subject. In one embodiment, the method comprises administering to the subject (1) a nucleic acid molecule encoding a protein of the disclosure comprising a Cas protein and optionally a localization sequence, such as an NLS, NES, or organelle localization signal, or a protein of the disclosure comprising a Cas protein and optionally a localization sequence, such as an NLS, NES, or organelle localization signal; and (2) a nucleic acid molecule encoding crRNA comprising a targeting nucleotide sequence complimentary to a RNA sequence in the target RNA or a crRNA molecule comprising a targeting nucleotide sequence complimentary to a target RNA sequence in the target RNA.

[0272] In one embodiment, the method comprises administering to the subject (1) a nucleic acid molecule encoding a protein of the disclosure comprising a Cas protein and optionally a localization sequence, such as an NLS, NES, or organelle localization signal; and (2) a nucleic acid molecule encoding crRNA comprising a targeting nucleotide sequence complimentary to a RNA sequence in the target RNA or a crRNA molecule comprising a targeting nucleotide sequence complimentary to a target RNA sequence in the target RNA.

[0273] In one embodiment, the method comprises administering to the subject (1) a protein of the disclosure comprising a Cas protein and optionally a localization sequence, such as an NLS, NES, or organelle localization signal; and (2) a nucleic acid molecule encoding crRNA comprising a targeting nucleotide sequence complimentary to a RNA sequence in the target RNA or a crRNA molecule comprising a targeting nucleotide sequence complimentary to a target RNA sequence in the target RNA.

[0274] In one embodiment, the disclosure provides a method of treating an RNA virus infection. In one embodiment, the method comprises administering to the subject (1) a nucleic acid molecule encoding a protein of the disclosure comprising a Cas protein and optionally a localization sequence, such as an NLS, NES, or organelle localization signal, or a protein of the disclosure comprising a Cas protein and optionally a localization sequence, such as an NLS, NES, or organelle localization signal; and (2) a nucleic acid molecule encoding crRNA comprising a targeting nucleotide sequence complimentary to a RNA sequence in the viral RNA or a crRNA molecule comprising a targeting nucleotide sequence complimentary to a target RNA sequence in the viral RNA. In one embodiment, the Cas protein binds the crRNA, the crRNA binds a target RNA sequence, and Cas cleaves the RNA sequence thereby preventing translation and expression of viral protein.

[0275] In one embodiment, the method comprises administering to the subject (1) a nucleic acid molecule encoding a protein of the disclosure comprising a Cas protein and optionally a localization sequence, such as an NLS, NES, or organelle localization signal; and (2) a nucleic acid molecule encoding crRNA comprising a targeting nucleotide sequence complimentary to a RNA sequence in the viral RNA or a crRNA molecule comprising a targeting nucleotide sequence complimentary to a target RNA sequence in the viral RNA.

[0276] In one embodiment, the method comprises administering to the subject (1) a protein of the disclosure comprising a Cas protein and optionally a localization sequence, such as an NLS, NES, or organelle localization signal; and (2) a nucleic acid molecule encoding crRNA comprising a targeting nucleotide sequence complimentary to a RNA sequence in the viral RNA or a crRNA molecule comprising a targeting nucleotide sequence complimentary to a target RNA sequence in the viral RNA.

### Methods of Treatment and Use

[0277] The present invention provides methods of treating, reducing the symptoms of, and/or reducing the risk of developing a disease or disorder in a subject. For example, in one embodiment, methods of the invention of treat, reduce the symptoms of, and/or reduce the risk of developing a disease or disorder in a mammal. In one embodiment, the methods of the invention of treat, reduce the symptoms of, and/or reduce the risk of developing a disease or disorder in a plant. In one embodiment, the methods of the invention of treat, reduce the symptoms of, and/or reduce the risk of developing a disease or disorder in a yeast organism.

[0278] In one embodiment, the subject is a cell. In one embodiment, the cell is a prokaryotic cell or eukaryotic cell. In one embodiment, the cell is a eukaryotic cell. In one embodiment, the cell is a plant, animal, or fungi cell. In one embodiment, the cell is a plant cell. In one embodiment, the cell is an animal cell. In one embodiment, the cell is a yeast cell.

[0279] In one embodiment, the subject is a mammal. For example, in one embodiment, the subject is a human, non-human primate, dog, cat, horse, cow, goat, sheep, rabbit, pig, rat, or mouse. In one embodiment, the subject is a non-mammalian subject. For example, in one embodiment, the subject is a zebrafish, fruit fly, or roundworm.

[0280] In one embodiment, the disease or disorder the infection of virus infection. In one embodiment, the disease or disorder is caused by an virus infection. In one embodiment, the virus infection is infection of an RNA virus. For example, in one embodiment, the virus infection is infection of a positive sense ssRNA virus, a negative sense ssRNA virus, adsRNA virus, or a ssRNA-RT virus. In one embodiment, the virus infection is infection of an DNA virus. For example, in one embodiment, the virus infection is infection of a dsDNA virus, a ssDNA virus, or a dsDNA-RT virus. Thus, in one embodiment, the disease or disorder is may be treated, reduced, or the risk can be reduced via an element that prevents or reduces a viral RNA transcript. Thus, in one embodiment, the disease or disorder is may be treated, reduced, or the risk can be reduced via an element that prevents or reduces viral mRNA transcript, or prevents or reduces translation of viral protein.

[0281] In one embodiment, the method comprises administering to the subject (1) a protein of the disclosure or a nucleic acid molecule encoding a protein of the disclosure, and (2) one or more crRNA comprising a nucleotide sequence complimentary to a viral RNA transcript. In one embodiment, the Cas protein cleaves the viral RNA transcript.

[0282] In one embodiment, the virus is an RNA virus. In one embodiment, the virus produces RNA during its lifecycle. In one embodiment, the virus is a human virus, a plant virus or an animal virus. Exemplary viruses include, but are not limited to, viruses of families Adenoviridae, Adenoviridae, Alphaflexiviridae, Anelloviridae, Arenavirus, Arteriviridae, Asfarviridae, Astroviridae, Benyviridae, Betaflexiviridae, Birnaviridae, Bornaviridae, Bromoviridae, Caliciviridae, Caulimoviridae, Circoviridae, Closteroviridae, Coronaviridae, Filoviridae, Flaviviridae, Geminiviridae, Hantaviridae, Hepadnaviridae, Hepeviridae, Herpesviridae, Kitaviridae, Luteoviridae, Nairoviridae, Nanoviridae, Nimaviridae, Orthomyxoviridae, Paramyxoviridae, Phenuiviridae, Picornaviridae, Polyomaviridae, Pospiviridae, Potyviridae, Poxviridae, Reoviridae, Retroviridae, Retrovirus, Rhabdoviridae, Secoviridae, Togaviridae, Tombusviridae, Tospoviridae, Tymoviridae, and Virgaviridae. For example, exemplary viruses include, but are not limited to, African swine fever, Avian hepatitis E, Avian infectious laryngotracheitis, Avian nephritis virus, Bamboo mosaic virus, Banana bunchy top virus, Barley stripe mosaic virus, Barley yellow dwarf virus, Potato leafroll virus, Borna disease, Brome mosaic virus, wheat, Cauliflower mosaic virus, Chikungunya, Eastern equine encephalitis virus, Citrus leprosis, Citrus sudden death associated virus, Citrus tristeza virus, Coconut cadang-cadang viroid, Curly top virus, African cassava mosaic virus, Cytomegalovirus, Epstein-Barr virus, Dengue, Yellow fever, West Nile, Zika, Ebola virus, Marburg virus, Equine arteritis virus, Porcine reproductive and respiratory syndrome virus, Equine infectious anemia, Foot and mouth disease, Foot and mouth disease, Enteroviruses, Rhinoviruses, Hepatitis B virus, Hepatitis E virus, HIV, HIV-1, HIV-2, Infectious bursal disease virus (poultry), Infectious pancreatic necrosis (salmon), Infectious canine hepatitis, aviadenoviruses of fowl, Influenza viruses, Lassa virus, Lymphocytic choriomeningitis virus, Monkeypox, Nairobi sheep disease, Newcastle disease virus (poultry), Norwalk virus, Numerous examples of crop damaging viruses, including Potato virus Y, Porcine circovirus 2, Beak and feather disease virus (poultry), Potato virus M, Rabies virus, Respiratory and enteric adenoviruses, Respiratory syncytial virus, Rice stripe necrosis virus, Rift Valley fever, rotaviruses, SARS-CoV-2, MERS, Sheeppox virus, Lumpy skin disease virus, Sin Nombre virus, Andes virus, SV40, Tobacco ringspot virus, Tomato bushy stunt virus, Tomato spotted wilt virus, Torque teno virus, Venezuelan equine encephalitis virus, Vesicular stomatitis Indiana virus, Viral hemorrhagic septicemia (trout), and White spot syndrome virus (shrimp).

[0283] In one embodiment, exemplary viruses include, but are not limited to, Primate T-lymphotropic virus 1, Primate T-lymphotropic virus 2, Primate T-lymphotropic virus 3, Human immunodeficiency virus 1, Human immunodeficiency virus 2, Simian foamy virus, Human picobirnavirus, Colorado tick fever virus, Changuinola virus, Great Island virus, Lebombo virus, Orungo virus, Rotavirus A, Rotavirus B, Rotavirus C, Banna virus, Borna disease virus, Lake Victoria Marburgvirus, Reston ebolavirus, Sudan ebolavirus, Tai forest ebolavirus, Zaire virus, Human parainfluenza virus 2, Human parainfluenza virus 4, Mumps virus, Newcastle disease virus, Human parainfluenza virus 1, Human parainfluenza virus 3, Hendra virus, Nipah virus, Measles virus, Human respiratory syncytial virus, Human metapneumovirus, Chandipura virus, Isfahan virus, Piry virus, Vesicular stomatitis Alagoas virus, Vesicular stomatitis Indiana virus, Vesicular stomatitis New Jersey virus, Australian bat lyssavirus, Duvenhage virus, European bat lyssavirus 1, European bat lyssavirus 2, Mokola virus, Rabies virus, Guanarito virus, Junin virus, Lassa virus, Lymphocytic choriomeningitis virus, Machupo virus, Pichinde virus, Sabia virus, Whitewater Arroyo virus, Bunyamwera virus, Bwamba virus, California encephalitis virus, Caraparu virus, Catu virus, Guama virus, Guaroa virus, Kairi virus, Marituba virus, Oriboca virus, Oropouche virus, Shuni virus, Tacaiuma virus, Wyeomyia virus, Andes virus, Bayou virus, Black creek canal virus, Dobrava-Belgrade virus, Hantaan virus, Laguna Negra virus, New York virus, Puumala virus, Seoul virus, Sin Nombre virus, Crimean-Congo haemorrhagic fever virus, Dugbe virus, Candiru virus, Punta Toro virus, Rift Valley fever virus, Sandfly fever Naples virus, Influenza A virus, Influenza B virus, Influenza C virus, Dhori virus, Thogoto virus, Hepatitis delta virus, Human coronavirus 229E, Human coronavirus NL63, Human coronavirus HKU1, Human coronavirus OC43, SARS coronavirus, Human torovirus, Human enterovirus A, Human enterovirus B, Human enterovirus C, Human enterovirus D, Human rhinovirus A, Human rhinovirus B, Human rhinovirus C, Encephalomyocarditis virus, Theilovirus, Equine rhinitis A virus, Foot and mouth disease virus, Hepatitis A virus, Human parechovirus, Ljungan virus, Aichi virus, Human astrovirus, Human astrovirus 2, Human astrovirus 3, Human astrovirus 4, Human astrovirus 5, Human astrovirus 6, Human astrovirus 7, Human astrovirus 8, Norwalk virus, Sapporo virus, Aroa virus, Banzi virus, Dengue virus, Ilheus virus, Japanese encephalitis virus, Kokobera virus, Kyasanur forest disease virus, Louping ill virus, Murray Valley encephalitis virus, Ntaya virus, Omsk haemorrhagic fever virus, Powassan virus, Rio Bravo virus, St Louis encephalitis virus, Tick-borne encephalitis virus, Usutu virus, Wesselsbron virus, West Nile virus, Yellow fever virus, Zika virus, Hepatitis C virus, Hepatitis E virus, Barmah Forest virus, Chikungunya virus, Eastern equine encephalitis virus, Everglades virus, Getah virus, Mayaro virus, Mucambo virus, O'nyong-nyong virus, Pixuna virus, Ross River virus, Semliki Forest virus, Sindbis virus, Venezuelan equine encephalitis virus, Western equine encephalitis virus, Whataroa virus, Rubella virus.

[0284] In one embodiment, exemplary viruses include, but are not limited to, Ranid herpesvirus 1, Ranid herpesvirus 2, Ranid herpesvirus 3, Anguillid herpesvirus 1, Cyprinid herpesvirus 1, Cyprinid herpesvirus 2, Cyprinid herpesvirus 3, Acipenserid herpesvirus 2, Ictalurid herpesvirus 1, Ictalurid herpesvirus 2, Salmonid herpesvirus 1, Salmonid herpesvirus 2, Salmonid herpesvirus 3, Gallid alphaherpesvirus 1, Psittacid alphaherpesvirus 1, Anatid alphaherpesvirus 1, Columbid alphaherpesvirus 1, Gallid alphaherpesvirus 2, Gallid alphaherpesvirus 3, Meleagrid alphaherpesvirus 1, Spheniscid alphaherpesvirus 1, Chelonid alphaherpesvirus 5, Testudinid alphaherpesvirus 3, Ateline alphaherpesvirus 1, Bovine alphaherpesvirus 2, Cercopithecine alphaherpesvirus 2, Human alphaherpesvirus 1, Human alphaherpesvirus 2, Leporid alphaherpesvirus 4, Macacine alphaherpesvirus 1, Macropodid alphaherpesvirus 1, Macropodid alphaherpesvirus 2, Panine alphaherpesvirus 3, Papiine alphaherpesvirus 2, Pteropodid alphaherpesvirus 1, Saimiriine alphaherpesvirus 1, Bovine alphaherpesvirus 1, Bovine alphaherpesvirus 5, Bubaline alphaherpesvirus 1, Canid alphaherpesvirus 1, Caprine alphaherpesvirus 1, Cercopithecine alphaherpesvirus 9, Cervid alphaherpesvirus 1, Cervid alphaherpesvirus 2, Equid alphaherpesvirus 1, Equid alphaherpesvirus 3, Equid alphaherpesvirus 4, Equid alphaherpesvirus 8, Equid alphaherpesvirus 9, Felid alphaherpesvirus 1, Human alphaherpesvirus 3, Monodontid alphaherpesvirus 1, Phocid alphaherpesvirus 1, Suid alphaherpesvirus 1, Chelonid alphaherpesvirus 6, Aotine betaherpesvirus 1, Cebine betaherpesvirus 1, Cercopithecine betaherpesvirus 5, Human betaherpesvirus 5, Macacine betaherpesvirus 3, Macacine betaherpesvirus 8, Mandrilline betaherpesvirus 1, Panine betaherpesvirus 2, Papiine betaherpesvirus 3, Papiine betaherpesvirus 4, Saimiriine betaherpesvirus 4, Murid betaherpesvirus 1, Murid betaherpesvirus 2, Murid betaherpesvirus 8, Elephantid betaherpesvirus 1, Elephantid betaherpesvirus 4, Elephantid betaherpesvirus 5, Human betaherpesvirus 7, Human betaherpesvirus 6A, Human betaherpesvirus 6B, Macacine betaherpesvirus 9, Murid betaherpesvirus 3, Suid betaherpesvirus 2, Caviid betaherpesvirus 2, Tupaiid betaherpesvirus 1, Callitrichine gammaherpesvirus 3, Cercopithecine gammaherpesvirus 14, Gorilline gammaherpesvirus 1, Human gammaherpesvirus 4, Macacine gammaherpesvirus 4, Macacine gammaherpesvirus 10, Panine gammaherpesvirus 1, Papiine gammaherpesvirus 1, Pongine gammaherpesvirus 2, Alcelaphine gammaherpesvirus 1, Alcelaphine gammaherpesvirus 2, Bovine gammaherpesvirus 6, Caprine gammaherpesvirus 2, Hippotragine gammaherpesvirus 1, Ovine gammaherpesvirus 2, Suid gammaherpesvirus 3, Suid gammaherpesvirus 4, Suid gammaherpesvirus 5, Equid gammaherpesvirus 2, Equid gammaherpesvirus 5, Felid gammaherpesvirus 1, Mustelid gammaherpesvirus 1, Phocid gammaherpesvirus 3, Vespertilionid gammaherpesvirus 1, Ateline gammaherpesvirus 2, Ateline gammaherpesvirus 3, Bovine gammaherpesvirus 4, Cricetid gammaherpesvirus 2, Human gammaherpesvirus 8, Macacine gammaherpesvirus 5, Macacine gammaherpesvirus 8, Macacine gammaherpesvirus 11, Macacine gammaherpesvirus 12, Murid gammaherpesvirus 4, Murid gammaherpesvirus 7, Saimiriine gammaherpesvirus 2, Equid gammaherpesvirus 7, Phocid gammaherpesvirus 2, Saguinine gammaherpesvirus 1, Iguanid herpesvirus 2, Haliotid herpesvirus 1, Ostreid herpesvirus 1, Salmonella virus SKML39, Shigella virus AG3, Dickeya virus Limestone, Dickeya virus RC2014, Escherichia virus CBA120, Escherichia virus PhaxI, Salmonella virus 38, Salmonella virus Det7, Salmonella virus GG32, Salmonella virus PM10, Salmonella virus SFP10, Salmonella virus SH19, Salmonella virus SJ3, Escherichia virus KWBSE43-6, Klebsiella virus 0507KN21, Klebsiella virus KpS110, Klebsiella virus May, Klebsiella virus Menlow, Serratia virus IME250, Erwinia virus Ea2809, Serratia virus MAM1, Acinetobacter virus Acibel007, Acinetobacter virus AB3, Acinetobacter virus AbKT21III, Acinetobacter virus Abp1, Acinetobacter virus Aci07, Acinetobacter virus Aci08, Acinetobacter virus AS11, Acinetobacter virus AS12, Acinetobacter virus Fri1, Acinetobacter virus IME200, Acinetobacter virus PD6A3, Acinetobacter virus PDAB9, Acinetobacter virus phiAB1, Acinetobacter virus SH-Ab 15519, Acinetobacter virus SWHAb1, Acinetobacter virus SWHAb3, Acinetobacter virus WCHABP5, Acinetobacter virus B1, Acinetobacter virus B2, Acinetobacter virus B5, Acinetobacter virus D2, Acinetobacter virus P1, Acinetobacter virus P2, Acinetobacter virus phiAB6, Acinetobacter virus Petty, Vibrio virus Vc1, Vibrio virus A318, Vibrio virus AS51, Vibrio virus Vp670, Marinomonas virus CB5A, Marinomonas virus CPP1m, Vibrio virus VEN, Pseudomonas virus Achelous, Pseudomonas virus Alpheus, Pseudomonas virus Nerthus, Pseudomonas virus Njord, Pseudomonas virus uligo, Pseudomonas virus C171, Pectobacterium virus PP16, Pectobacterium virus PPWS1, Pectobacterium virus PPWS2, Pectobacterium virus CB5, Pectobacterium virus Clickz, Pectobacterium virus fM1, Pectobacterium virus Gaspode, Pectobacterium virus Khlen, Pectobacterium virus Koot, Pectobacterium virus Lelidair, Pectobacterium virus Nobby, Pectobacterium virus Peat1, Pectobacterium virus Phoria, Pectobacterium virus PP90, Pectobacterium virus Zenivior, Dickeya virus BF25-12, Pseudomonas virus NV3, Pseudomonas virus 130-113, Pseudomonas virus 15pyo, Pseudomonas virus Ab05, Pseudomonas virus ABTNL, Pseudomonas virus DL62, Pseudomonas virus kF77, Pseudomonas virus LKD16, Pseudomonas virus LUZ19, Pseudomonas virus MPK6, Pseudomonas virus MPK7, Pseudomonas virus NFS, Pseudomonas virus PAXYB1, Pseudomonas virus phiKMV, Pseudomonas virus PT2, Pseudomonas virus PT5, Pseudomonas virus RLP, Pseudomonas virus LKA1, Pseudomonas virus f2, Aeromonas virus 25AhydR2PP, Aeromonas virus AS7, Aeromonas virus ZPAH7, Yersinia virus ISAO8, Aeromonas virus Ahp1, Aeromonas virus CF7, Cronobacter virus DevCD23823, Cronobacter virus GAP227, Salmonella virus Spp16, Yersinia virus R8-01, Yersinia virus fHeYen301, Yersinia virus Phi80-18, Pectobacterium virus Arno160, Pectobacterium virus PP2, Proteus virus PM85, Proteus virus PM93, Proteus virus PM116, Proteus virus Pm5460, Pectobacterium virus PP1, Erwinia virus Era103, Erwinia virus S2, Lelliottia virus phD2B, Citrobacter CrRp3, Escherichia virus LL11, Escherichia virus AAPEc6, Escherichia virus ACGC91, Escherichia virus B, Escherichia virus C, Escherichia virus K, Escherichia virus K1-5, Escherichia virus K1E, Escherichia virus mutPK1A2, Escherichia virus VEc3, Escherichia virus UAB78, Salmonella virus BP12B, Salmonella virus SP6, Burkholderia virus BpAMP1, Ralstonia virus RSPI1, Ralstonia virus RSB1, Ralstonia virus RsoP1IDN, Burkholderia virus JG068, Ralstonia virus RSJ2, Ralstonia virus RSJ5, Ralstonia virus RSPII1, Shigella virus Buco, Escherichia virus Minorna, Klebsiella virus AltoGao, Klebsiella virus BO1E, Klebsiella virus F19, Klebsiella virus K244, Klebsiella virus Kp2, Klebsiella virus KP34, Klebsiella virus KPRio2015, Klebsiella virus KpS2, Klebsiella virus KpV41, Klebsiella virus KpV48, Klebsiella virus KpV71, Klebsiella virus KpV74, Klebsiella virus KpV475, Klebsiella virus KPV811, Klebsiella virus myPSH1235, Klebsiella virus SU503, Klebsiella virus SU552A, Shigella virus SFN6B, Enterobacter virus KDA1, Proteus virus PM16, Proteus virus PM75, Dickeya virus Dagda, Dickeya virus Katbat, Dickeya virus Luksen, Dickeya virus Mysterion, Yersinia virus AP10, Erwinia virus FE44, Escherichia virus 285P, Escherichia virus BA14, Escherichia virus P483, Escherichia virus P694, Escherichia virus S523, Kluyvera virus Kvp1, Pectobacterium virus PP74, Salmonella virus BP12A, Salmonella virus BSP161, Shigella virus A7, Yersinia virus Berlin, Yersinia virus PYPS50, Yersinia virus Yepe2, Yersinia virus Yepf, Citrobacter virus CR8, Vibrio virus ICP3, Vibrio virus N4, Vibrio virus VP4, Enterobacter virus Eap1, Erwinia virus L1, Escherichia virus SRT7, Pseudomonas virus 17A, Pseudomonas virus gh1, Pseudomonas virus Henninger, Pseudomonas virus KNP, Pseudomonas virus Pf1ERZ2017, Pseudomonas virus PhiPSA2, Pseudomonas virus PhiPsa17, Pseudomonas virus PPPL1, Pseudomonas virus shl2, Pseudomonas virus WRT, Yersinia virus fPS9, Yersinia virus fPS53, Yersinia virus fPS59, Yersinia virus fPS54ocr, Pectobacterium virus Jarilo, Citrobacter virus CR44b, Citrobacter virus SH3, Citrobacter virus SH4, Cronobacter virus Dev2, Cronobacter virus GW1, Enterobacter virus EcpYZU01, Escherichia virus EcoDS1, Escherichia virus F, Escherichia virus GA2A, Escherichia virus IMM002, Escherichia virus K1F, Escherichia virus LM33P1, Escherichia virus PE3-1, Escherichia virus Ro451w, Escherichia virus ST31, Escherichia virus Vec13, Escherichia virus YZ1, Escherichia virus ZG49, Shigella virus SFPH2, Morganella virus MmP1, Morganella virus MP2, Dickeya virus JA10, Dickeya virus Ninurta, Pectobacterium virus PP47, Pectobacterium virus PP81, Pectobacterium virus PPWS4, Pseudomonas virus PPpW4, Pseudomonas virus 22PfluR64PP, Pseudomonas virus IBBPF7A, Pseudomonas virus Pf10, Pseudomonas virus PFP1, Pseudomonas virus PhiS1, Pseudomonas virus UNOSLW1, Pseudomonas virus PspYZU08, Escherichia virus K30, Klebsiella virus 2044-307w, Klebsiella virus BIS33, Klebsiella virus Henu1, Klebsiella virus IL33, Klebsiella virus IME205, Klebsiella virus IME321, Klebsiella virus K5, Klebsiella virus K11, Klebsiella virus K5-2, Klebsiella virus K5-4, Klebsiella virus KN1-1, Klebsiella virus KN3-1, Klebsiella virus KN4-1, Klebsiella virus Kp1, Klebsiella virus KP32, Klebsiella virus KP32i192, Klebsiella virus KP32i194, Klebsiella virus KP32i195, Klebsiella virus KP32i196, Klebsiella virus kpssk3, Klebsiella virus KpV289, Klebsiella virus KpV763, Klebsiella virus KpV766, Klebsiella virus KpV767, Klebsiella virus Pharr, Klebsiella virus PRA33, Klebsiella virus SHKp152234, Klebsiella virus SHKp152410, Citrobacter virus CFP1, Citrobacter virus SH1, Citrobacter virus SH2, Enterobacter virus E2, Enterobacter virus E3, Enterobacter virus KPN3, Enterobacteria virus T7M, Escherichia virus ECA2, Escherichia virus LL2, Escherichia virus T3, Escherichia virus T3Luria, Leclercia virus 10164-302, Salmonella virus SG-JL2, Serratia virus 2050H2, Serratia virus SM9-3Y, Yersinia virus AP5, Yersinia virus YeF10, Yersinia virus YeO3-12, Enterobacteria virus IME390, Escherichia virus 13a, Escherichia virus 64795ec1, Escherichia virus C5, Escherichia virus CICC80001, Escherichia virus Ebrios, Escherichia virus EG1, Escherichia virus HZ2R8, Escherichia virus HZP2, Escherichia virus N30, Escherichia virus NCA, Escherichia virus T7, Salmonella virus 3A8767, Salmonella virus Vi06, Stenotrophomonas virus IME15, Yersinia virus YpPY, Yersinia virus YpsPG, Pseudomonas virus Phi15, Pectobacterium virus DUPPII, Synechococcus virus SCBP42, Aquamicrobium virus P14, Ashivirus S45C4, Agrobacterium virus Atuph02, Agrobacterium virus Atuph03, Ralstonia virus Ap1, Ayaqvirus S45C18, Prochlorococcus virus SS120-1, Pseudomonas virus Andromeda, Pseudomonas virus Bf7, Escherichia virus J8-65, Escherichia virus Lidtsur, Prochlorococcus virus NATL1A7, Chosvirus KM23C739, Rhizobium virus RHEph02, Rhizobium virus RHEph08, Rhizobium virus RHEph09, Vibrio virus Cyclit, Escherichia virus PGT2, Escherichia virus PhiKT, Alteromonas virus H4-4, Foussvirus S46C10, Fussvirus S30C28, Escherichia virus ECBP5, Pectobacterium virus PP99, Ralstonia virus DURPI, Ralstonia virus RsoP1EGY, Synechococcus STIP37, Jalkavirus S08C159, Ralstonia virus RSB3, Kawavirus SWcelC56, Synechococcus virus SRIP1, Providencia virus PS3, Curvibacter virus P26059B, Ralstonia virus RSB2, Synechococcus virus SCBP2, Krakvirus S39C11, Podovirus Lau218, Pantoea virus LIMElight, Prochlorococcus virus PGSP1, Synechococcus virus SCBP3, Caulobacter virus Lullwater, Vibrio virus KF1, Vibrio virus KF2, Vibrio virus OWB, Vibrio virus VP93, Pseudomonas virus VSW3, Nohivirus S31C1, Oinczvirus S37C6, Rhizobium virus RHEph01, Pagavirus S05C849, Mesorhizobium virus Lo5R7ANS, Pedosvirus S28C3, Pekhitvirus S04C24, Pelagibacter virus HTVC019P, Pelagivirus S35C6, Caulobacter virus Percy, Delftia virus IMEDE1, Podivirus S05C243, Pseudomonas virus PollyC, Synechococcus virus SCBP4, Powvirus S08C41, Xanthomonas virus f20, Xanthomonas virus f30, Xanthomonas virus XAJ24, Xanthomonas virus Xc10, Xylella virus Prado, Synechococcus virus SB28, Sphingomonas virus Scott, Synechococcus virus SRIP2, Ralstonia virus ITL1, Sieqvirus S42C7, Ralstonia virus RPSC1, Stopalavirus S38C3, Pelagibacter virus HTVC011P, Stupnyavirus KM16C193, Prochlorococcus virus 951510a, Prochlorococcus virus NATL2A133, Prochlorococcus virus PSSP10, Vibrio virus JSF7, Prochlorococcus virus PSSP7, Synechococcus virus P60, Prochlorococcus virus PSSP3, Synechococcus virus PSSP2, Synechococcus virus Syn5, Votkovvirus S28C10, Pantoea virus LIMEzero, Pasteurella virus PHB01, Pasteurella virus PHB02, Escherichia virus GJ1, Escherichia virus ST32, Erwinia virus Faunus, Erwinia virus Y2, Aeromonas virus pAh6C, Pectobacterium virus PM1, Pectobacterium virus PP101, Shewanella virus Spp001, Shewanella virus SppYZU05, Vibrio virus Ceto, Vibrio virus Thalassa, Vibrio virus JSF10, Vibrio virus JSF12, Vibrio virus phi3, Vibrio virus pVp1, Escherichia virus EPS7, Escherichia virus mar003J3, Escherichia virus saus132, Salmonella virus 123, Salmonella virus 329, Salmonella virus 118970sal2, Salmonella virus LVR16A, Salmonella virus S113, Salmonella virus S114, Salmonella virus S116, Salmonella virus S124, Salmonella virus S126, Salmonella virus S132, Salmonella virus S133, Salmonella virus S147, Salmonella virus Seafire, Salmonella virus SH9, Salmonella virus STG2, Salmonella virus Stitch, Salmonella virus Sw2, Yersinia virus phiR201, Escherichia virus AKFV33, Escherichia virus BF23, Escherichia virus chee24, Escherichia virus DT5712, Escherichia virus DT57C, Escherichia virus FFH1, Escherichia virus Gostya9, Escherichia virus H8, Escherichia virus mar004NP2, Escherichia virus OSYSP, Escherichia virus phiAPCEc03, Escherichia virus phiLLS, Escherichia virus slur09, Escherichia virus T5, Salmonella virus NR01, Salmonella virus S131, Salmonella virus Shivani, Salmonella virus SPO1, Salmonella virus SP3, Salmonella virus SPC35, Shigella virus SHSML45, Shigella virus SSP1, Pectobacterium virus DUPPV, Pectobacterium virus My1, Proteus virus PM135, Proteus virus Stubb, Vibrio virus PG07, Vibrio virus VspSw1, Aeromonas virus AhSzq1, Aeromonas virus AhSzw1, Klebsiella virus IME260, Klebsiella virus Sugarland, Escherichia virus IME542, Escherichia virus ACGM12, Escherichia virus EC3a, Escherichia virus DTL, Escherichia virus IME253, Escherichia virus Rtp, Shigella virus Sf12, Escherichia virus phiEB49, Escherichia virus AHP42, Escherichia virus AHS24, Escherichia virus AKS96, Escherichia virus C119, Escherichia virus E41c, Escherichia virus Eb49, Escherichia virus Jk06, Escherichia virus KP26, Escherichia virus phiJLA23, Escherichia virus Rogue1, Shigella virus Sd1, Shigella virus pSf1, Citrobacter virus DK2017, Citrobacter virus Sazh, Citrobacter virus Stevie, Escherichia virus LL5, Escherichia virus TLS, Salmonella virus 36, Salmonella virus PHB07, Salmonella virus phSE2, Salmonella virus SP126, Salmonella virus YSP2, Escherichia virus 95, Escherichia virus mar001J1, Escherichia virus mar002J2, Escherichia virus SECphi27, Escherichia virus swan01, Escherichia virus IME347, Escherichia virus SRT8, Escherichia virus ADB2, Escherichia virus BIFF, Escherichia virus IME18, Escherichia virus JMPW1, Escherichia virus JMPW2, Escherichia virus SH2, Escherichia virus T1, Shigella virus 008, Shigella virus ISF001, Shigella virus PSf2, Shigella virus Sfin1, Shigella virus SH6, Shigella virus Shfl1, Shigella virus ISF002, Cronobacter virus Esp2949-1, Enterobacter virus EcL1, Cronobacter virus PhiCS01, Escherichia virus ESCO41, Pantoea virus AAS23, Escherichia virus NBD2, Enterobacter virus F20, Klebsiella virus 1513, Klebsiella virus GHK3, Klebsiella virus KLPN1, Klebsiella virus KOX1, Klebsiella virus KP36, Klebsiella virus KpCol1, Klebsiella virus KpKT21phi1, Klebsiella virus KPN N141, Klebsiella virus KpV522, Klebsiella virus MezzoGao, Klebsiella virus NJR15, Klebsiella virus NJS1, Klebsiella virus NJS2, Klebsiella virus PKP126, Klebsiella virus Sushi, Klebsiella virus TAH8, Klebsiella virus TSK1, Bacillus virus Agate, Bacillus virus Bobb, Bacillus virus Bp8pC, Bacillus virus Bastille, Bacillus virus CAM003, Bacillus virus Evoli, Bacillus virus HoodyT, Bacillus virus AvesoBmore, Bacillus virus B4, Bacillus virus Bigbertha, Bacillus virus Riley, Bacillus virus Spock, Bacillus virus Troll, Bacillus virus Bc431, Bacillus virus Bcp1, Bacillus virus BCP82, Bacillus virus BM15, Bacillus virus Deepblue, Bacillus virus JBP901, Bacillus virus Grass, Bacillus virus NIT1, Bacillus virus SPG24, Bacillus virus BCP78, Bacillus virus TsarBomba, Bacillus virus BPS13, Bacillus virus BPS10C, Bacillus virus Hakuna, Bacillus virus Megatron, Bacillus virus WPh, Bacillus virus Mater, Bacillus virus Moonbeam, Bacillus virus SIOphi, Enterococcus virus ECP3, Enterococcus virus EF24C, Enterococcus virus EFLK1, Enterococcus virus EFDG1, Enterococcus virus EFP01, Enterococcus virus EfV12, Listeria virus A511, Listeria virus AG20, Listeria virus List36, Listeria virus LMSP25, Listeria virus LMTA34, Listeria virus LMTA148, Listeria virus LP048, Listeria virus LP064, Listeria virus LP083-2, Listeria virus P100, Listeria virus WIL1, Bacillus virus Camphawk, Bacillus virus SPO1, Bacillus virus CP51, Bacillus virus JL, Bacillus virus Shanette, Staphylococcus virus BS1, Staphylococcus virus BS2, Lactobacillus virus Bacchae, Lactobacillus virus Bromius, Lactobacillus virus Iacchus, Lactobacillus virus Lpa804, Lactobacillus virus Semele, Staphylococcus virus G1, Staphylococcus virus G15, Staphylococcus virus JD7, Staphylococcus virus K, Staphylococcus virus MCE2014, Staphylococcus virus P108, Staphylococcus virus Rodi, Staphylococcus virus S253, Staphylococcus virus S25-4, Staphylococcus virus SA12, Staphylococcus virus Sb1, Staphylococcus virus SscM1, Staphylococcus virus IPLAC1C, Staphylococcus virus SEP1, Staphylococcus virus Remus, Staphylococcus virus SA11, Staphylococcus virus Stau2, Staphylococcus virus Twort, Brochothrix virus A9, Lactobacillus virus Lb338-1, Lactobacillus virus LP65, Campylobacter virus CP21, Campylobacter virus CP220, Campylobacter virus CPt10, Campylobacter virus IBB35, Campylobacter virus CP81, Campylobacter virus CP30A, Campylobacter virus CPX, Campylobacter virus Los1, Campylobacter virus NCTC12673, Escherichia virus Alf5, Escherichia virus AYO145A, Escherichia virus EC6, Escherichia virus HY02, Escherichia virus JH2, Escherichia virus TP1, Escherichia virus VpaE1, Escherichia virus wV8, Salmonella virus BPS15Q2, Salmonella virus BPS17L1, Salmonella virus BPS17W1, Salmonella virus FelixO1, Salmonella virus Mushroom, Salmonella virus Si3, Salmonella virus SP116, Salmonella virus UAB87, Erwinia virus Ea214, Erwinia virus M7, Citrobacter virus Moogle, Citrobacter virus Mordin, Shigella virus Sf13, Shigella virus Sf14, Shigella virus Sf17, Escherichia virus SUSP1, Escherichia virus SUSP2, Ralstonia virus RSA1, Ralstonia virus RSY1, Mannheimia virus 1127AP1, Mannheimia virus PHL101, Aeromonas virus phiO18P, Vibrio virus Canoe, Pseudoalteromonas virus C5a, Pseudomonas virus Dobby, Pseudomonas virus phiCTX, Erwinia virus EtG, Escherichia virus 186, Salmonella virus PsP3, Salmonella virus SEN1, Erwinia virus ENT90, Klebsiella virus 4LV2017, Salmonella virus Fels2, Salmonella virus RE2010, Salmonella virus SEN8, Salmonella virus SopEphi, Haemophilus virus HP1, Haemophilus virus HP2, Vibrio virus Kappa, Pasteurella virus F108, Burkholderia virus KS14, Burkholderia virus AP3, Burkholderia virus KS5, Vibrio virus K139, Burkholderia virus ST79, Escherichia virus fiAA91ss, Escherichia virus P2, Escherichia virus pro147, Escherichia virus pro483, Escherichia virus Wphi, Yersinia virus L413C, Pseudomonas virus phi3, Salinivibrio virus SMHB1, Klebsiella virus 3LV2017, Salmonella virus SEN4, Cronobacter virus ESSI2, Stenotrophomonas virus Smp131, Salmonella virus FSLSP004, Burkholderia virus KL3, Burkholderia virus phi52237, Burkholderia virus phiE122, Burkholderia virus phiE202, Vibrio virus PV94, Escherichia virus P88, Escherichia virus Bp7, Escherichia virus IME08, Escherichia virus JS10, Escherichia virus JS98, Escherichia virus MX01, Escherichia virus QL01, Escherichia virus VR5, Escherichia virus WG01, Escherichia virus VR7, Escherichia virus VR20, Escherichia virus VR25, Escherichia virus VR26, Shigella virus SP18, Salmonella virus Melville, Salmonella virus S16, Salmonella virus STML198, Salmonella virus STP4a, Klebsiella virus JD18, Klebsiella virus PKO111, Enterobacter virus PG7, Escherichia virus CC31, Escherichia virus ECD7, Escherichia virus GEC3S, Escherichia virus JSE, Escherichia virus phi1, Escherichia virus RB49, Citrobacter virus CF1, Citrobacter virus Merlin, Citrobacter virus Moon, Escherichia virus APCEc01, Escherichia virus HP3, Escherichia virus HX01, Escherichia virus JS09, Escherichia virus O157tp3, Escherichia virus O157tp6, Escherichia virus PhAPEC2, Escherichia virus RB69, Escherichia virus ST0, Shigella virus SHSML521, Shigella virus UTAM, Vibrio virus KVP40, Vibrio virus nt1, Vibrio virus ValKK3, Enterobacter virus Eap3, Klebsiella virus KP15, Klebsiella virus KP27, Klebsiella virus Matisse, Klebsiella virus Miro, Klebsiella virus PMBT1, Escherichia virus AR1, Escherichia virus C40, Escherichia virus CF2, Escherichia virus E112, Escherichia virus ECML134, Escherichia virus HY01, Escherichia virus HY03, Escherichia virus Ime09, Escherichia virus RB3, Escherichia virus RB14, Escherichia virus slur03, Escherichia virus slur04, Escherichia virus T4, Shigella virus Pss1, Shigella virus Sf21, Shigella virus Sf22, Shigella virus Sf24, Shigella virus SHBML501, Shigella virus Shfl2, Yersinia virus D1, Yersinia virus PST, Acinetobacter virus 133, Aeromonas virus 65, Aeromonas virus Aeh1, Escherichia virus RB16, Escherichia virus RB32, Escherichia virus RB43, Pseudomonas virus 42, Escherichia virus Av05, Cronobacter virus CR3, Cronobacter virus CR8, Cronobacter virus CR9, Cronobacter virus PBES02, Pectobacterium virus phiTE, Cronobacter virus GAP31, Escherichia virus 4MG, Salmonella virus PVPSE1, Salmonella virus SSE121, Escherichia virus APECc02, Escherichia virus FFH2, Escherichia virus FV3, Escherichia virus JES2013, Escherichia virus Murica, Escherichia virus slur16, Escherichia virus V5, Escherichia virus V18, Brevibacillus virus Abouo, Brevibacillus virus Davies, Synechococcus virus SMbCM100, Erwinia virus Deimos, Erwinia virus Desertfox, Erwinia virus Ea35-70, Erwinia virus RAY, Erwinia virus Simmy50, Erwinia virus SpecialG, Synechococcus virus SShM2, Klebsiella virus K64-1, Klebsiella virus RaK2, Dickeya virus AD1, Erwinia virus Alexandra, Lactobacillus virus LBR48, Synechococcus virus SCAM1, Synechococcus virus SCBWM1, Vibrio virus Aphrodite1, Escherichia virus 121Q, Escherichia virus PBECO4, Synechococcus virus AC2014fSyn7803C8, Synechococcus virus ACG2014f, Synechococcus virus ACG2014fSyn7803US26, Synechococcus virus STIM5, Pseudomonas virus PaBG, Rheinheimera virus Barba18A, Rheinheimera virus Barba19A, Rheinheimera virus Barba21A, Rheinheimera virus Barba5S, Rheinheimera virus Barba8S, Burkholderia virus BcepMu, Burkholderia virus phiE255, Synechococcus virus Bellamy, Gordonia virus GMA6, Aeromonas virus 44RR2, Mycobacterium virus Alice, Mycobacterium virus Bxz1, Mycobacterium virus Dandelion, Mycobacterium virus HyRo, Mycobacterium virus 13, Mycobacterium virus Lukilu, Mycobacterium virus Nappy, Mycobacterium virus Sebata, Faecalibacterium virus Brigit, Prochlorococcus virus Syn33, Synechococcus virus SRIM12-01, Synechococcus virus SRIM12-06, Synechococcus virus SRIM12-08, Salmonella virus SEN34, Acidovorax virus ACP17, Xanthomonas virus Carpasina, Xanthomonas virus XcP1, Pseudomonas virus pf16, Synechococcus virus SCAM3, Ralstonia virus RSF1, Ralstonia virus RSL2, Synechococcus virus SWAM2, Erwinia virus Derbicus, Pseudomonas virus EL, Sinorhizobium virus M7, Sinorhizobium virus M12, Sinorhizobium virus N3, Serratia virus BF, Yersinia virus Yen9-04, Faecalibacterium virus Epona, Erwinia virus Asesino, Erwinia virus EaH2, Prochlorococcus virus MED4-213, Prochlorococcus virus PHM1, Prochlorococcus virus PHM2, Flavobacterium virus FCL2, Flavobacterium virus FCV1, Pseudomonas virus KIL2, Pseudomonas virus KIL4, Edwardsiella virus GF2, Escherichia virus Goslar, Halomonas virus HAP1, Vibrio virus VP882, Lactobacillus virus Lb, Erwinia virus EaH1, Iodobacter virus PLPE, Delftia virus PhiW14, Klebsiella virus JD001, Klebsiella virus KpV52, Klebsiella virus KpV80, Escherichia virus CVM10, Escherichia virus ECOO78, Escherichia virus ep3, Brevibacillus virus Jimmer, Brevibacillus virus Osiris, Synechococcus virus SCAM9, Rhizobium virus RHEph4, Faecalibacterium virus Lagaffe, Synechococcus virus SP4, Synechococcus virus Syn30, Prochlorococcus virus PTIM40, Synechococcus virus SSKS1, Salmonella virus ZCSE2, Clostridium virus phiC2, Clostridium virus phiCD27, Clostridium virus phiCD119, Erwinia virus Machina, Arthrobacter virus BarretLemon, Arthrobacter virus Beans, Arthrobacter virus Brent, Arthrobacter virus Jawnski, Arthrobacter virus Martha, Arthrobacter virus Piccoletto, Arthrobacter virus Shade, Arthrobacter virus Sonny, Synechococcus virus SCAM7, Acinetobacter virus ME3, Ralstonia virus RSL1, Cronobacter virus GAP32, Pectinobacterium virus CBB, Faecalibacterium virus Mushu, Escherichia virus Mu, Shigella virus SfMu, Halobacterium virus phiH, Burkholderia virus Bcep1, Burkholderia virus Bcep43, Burkholderia virus Bcep781, Burkholderia virus BcepNY3, Xanthomonas virus OP2, Synechococcus virus SMbCM6, Pseudomonas virus Ab03, Pseudomonas virus G1, Pseudomonas virus KPP10, Pseudomonas virus PAKP3, Pseudomonas virus PS24, Synechococcus virus SRIM8, Synechococcus virus SRIM50, Synechococcus virus ACG2014bSyn7803C61, Synechococcus virus ACG2014bSyn9311C4, Synechococcus virus SRIM2, Synechococcus virus SPM2, Pseudomonas virus Noxifer, Acinetobacter virus AB1, Acinetobacter virus AB2, Acinetobacter virus AbC62, Acinetobacter virus AbP2, Acinetobacter virus AP22, Acinetobacter virus LZ35, Acinetobacter virus WCHABP1, Acinetobacter virus WCHABP12, Pseudomonas virus Psa374, Pseudomonas virus VCM, Pseudomonas virus CAb1, Pseudomonas virus CAb02, Pseudomonas virus JG004, Pseudomonas virus MAG1, Pseudomonas virus PA10, Pseudomonas virus PAKP1, Pseudomonas virus PAKP2, Pseudomonas virus PAKP4, Pseudomonas virus PaP1, Pseudomonas virus phiMK, Pseudomonas virus Zigelbrucke, Prochlorococcus virus PSSM7, Burkholderia virus BcepF1, Pseudomonas virus 141, Pseudomonas virus Ab28, Pseudomonas virus CEBDP1, Pseudomonas virus DL60, Pseudomonas virus DL68, Pseudomonas virus E215, Pseudomonas virus E217, Pseudomonas virus F8, Pseudomonas virus JG024, Pseudomonas virus KPP12, Pseudomonas virus KTN6, Pseudomonas virus LBL3, Pseudomonas virus LMA2, Pseudomonas virus NH4, Pseudomonas virus PA5, Pseudomonas virus PB1, Pseudomonas virus PS44, Pseudomonas virus SN, Pectinobacterium virus PEAT2, Edwardsiella virus pEtSU, Bordetella virus PHB04, Escherichia phage ESCO13, Escherichia virus ESCO5, Escherichia virus phAPEC8, Escherichia virus Schickermooser, Klebsiella virus ZCKP1, Pseudomonas virus PA7, Pseudomonas virus phiKZ, Pseudomonas virus SL2, Pseudomonas virus PMW, Agrobacterium virus Atuph07, Synechococcus virus Syn19, Aeromonas virus 56, Aeromonas virus 43, Escherichia virus P1, Escherichia virus RCS47, Salmonella virus SJ46, Pseudoalteromonas virus J2-1, Arthrobacter virus ArV1, Arthrobacter virus Colucci, Arthrobacter virus Trina, Ralstonia virus RP12, Erwinia virus Risingsun, Salmonella virus BP63, Acinetobacter virus Aci05, Acinetobacter virus Aci01-1, Acinetobacter virus Aci02-2, Prochlorococcus virus PSSM2, Dickeya virus JA11, Dickeya virus JA29, Erwinia virus Y3, Agrobacterium virus 7-7-1, Salmonella virus SPN3US, Bacillus virus Shbh1, Bacillus virus 1, Geobacillus virus GBSV1, Pseudomonas virus tabernarius, Synechococcus virus ST4, Faecalibacterium virus Taranis, Synechococcus virus SIOM18, Yersinia virus R1RT, Yersinia virus TG1, Synechococcus virus STIM4, Synechococcus virus SSM1, Bacillus virus SP15, Vibrio virus pTD1, Vibrio virus VP4B, Tetrasphaera virus TJE1, Faecalibacterium virus Toutatis, Aeromonas virus 25, Aeromonas virus Aes12, Aeromonas virus Aes508, Aeromonas virus AS4, Aeromonas virus Asgz, Stenotrophomonas virus IME13, Prochlorococcus virus Syn1, Synechococcus virus SRIM44, Vibrio virus MAR, Vibrio virus VHML, Vibrio virus VP585, Escherichia virus ECML4, Salmonella virus Marshall, Salmonella virus Maynard, Salmonella virus SJ2, Salmonella virus STML131, Salmonella virus ViI, Erwinia virus Wellington, Escherichia virus ECML-117, Escherichia virus FEC19, Escherichia virus WFC, Escherichia virus WFH, Serratia virus CHI14, Edwardsiella virus MSW3, Edwardsiella virus PEi21, Erwinia virus Yoloswag, Bacillus virus G, Bacillus virus PBS1, Microcystis virus Ma-LMM01, Streptococcus virus Cp1, Streptococcus virus Cp7, Lactococcus virus WP2, Bacillus virus B103, Bacillus virus GA1, Bacillus virus phi29, Kurthia virus 6, Actinomyces virus Av1, Mycoplasma virus P1, Staphylococcus virus Andhra, Staphylococcus virus St134, Staphylococcus virus 66, Staphylococcus virus 44AHJD, Staphylococcus virus BP39, Staphylococcus virus CSA13, Staphylococcus virus GRCS, Staphylococcus virus Pabna, Staphylococcus virus phiAGO13, Staphylococcus virus PSa3, Staphylococcus virus S24-1, Staphylococcus virus SAP2, Staphylococcus virus SCH1, Staphylococcus virus SLPW, Shigella virus 7502Stx, Shigella virus POCJ13, Escherichia virus 191, Escherichia virus PA2, Escherichia virus TL2011, Shigella virus VASD, Escherichia virus 24B, Escherichia virus 933W, Escherichia virus Min27, Escherichia virus PA28, Escherichia virus Stx2 II, Dinoroseobacter virus DFL12, Pseudomonas virus Bjorn, Pseudomonas virus Ab22, Pseudomonas virus CHU, Pseudomonas virus LUZ24, Pseudomonas virus PAA2, Pseudomonas virus PaP3, Pseudomonas virus PaP4, Pseudomonas virus TL, Vibrio virus VC8, Vibrio virus VP2, Vibrio virus VP5, Escherichia virus N4, Flavobacterium virus Fpv1, Flavobacterium virus Fpv4, Streptococcus virus C1, Escherichia virus APEC5, Escherichia virus APEC7, Escherichia virus Bp4, Escherichia virus EC1UPM, Escherichia virus ECBP1, Escherichia virus G7C, Escherichia virus IME11, Shigella virus Sb1, Escherichia virus C1302, Pseudomonas virus F116, Pseudomonas virus H66, Escherichia virus Pollock, Salmonella virus FSL SP-058, Salmonella virus FSL SP-076, Arthrobacter virus Adat, Arthrobacter virus Jasmine, Erwinia virus Ea9-2, Erwinia virus Frozen, Achromobacter virus Axp3, Achromobacter virus JWAlpha, Edwardsiella virus KF1, Burkholderia virus KL4, Pseudomonas virus KPP25, Pseudomonas virus R18, Pseudomonas virus tf, Escherichia virus 172-1, Escherichia virus ECB2, Escherichia virus NJ01, Escherichia virus phiEco32, Escherichia virus Septima11, Escherichia virus SU10, Escherichia virus HK620, Salmonella virus BTP1, Salmonella virus P22, Salmonella virus SE1Spa, Salmonella virus ST64T, Shigella virus Sf6, Burkholderia virus Bcep22, Burkholderia virus Bcepil02, Burkholderia virus Bcepmigl, Burkholderia virus DC1, Cellulophaga virus Cba41, Cellulophaga virus Cba172, Pseudomonas virus Ab09, Pseudomonas virus LIT1, Pseudomonas virus PA26, Pseudomonas virus KPP21, Pseudomonas virus LUZ7, Vibrio virus 48B1, Vibrio virus 51A6, Vibrio virus 51A7, Vibrio virus 52B1, Myxococcus virus Mx8, Bacillus virus Page, Bacillus virus Palmer, Bacillus virus Pascal, Bacillus virus Pony, Bacillus virus Pookie, Brucella virus Pr, Brucella virus Tb, Bordetella virus BPP1, Burkholderia virus BcepC6B, Helicobacter virus 1961P, Helicobacter virus KHP30, Helicobacter virus KHP40, Pseudomonas virus phCDa, Escherichia virus Skarpretter, Escherichia virus Sortsne, Klebsiella virus IME279, Escherichia virus phiV10, Salmonella virus Epsilon15, Salmonella virus SPN1S, Pseudomonas virus NV1, Pseudomonas virus UFVP2, Escherichia virus PTXU04, Hamiltonella virus APSE1, Lactococcus virus KSY1, Phormidium virus WMP3, Phormidium virus WMP4, Pseudomonas virus 119X, Roseobacter virus SIO1, Vibrio virus VpV262, Streptomyces virus ELB20, Streptomyces virus R4, Streptomyces virus Amela, Streptomyces virus phiCAM, Streptomyces virus Aaronocolus, Streptomyces virus Caliburn, Streptomyces virus Danzina, Streptomyces virus Hydra, Streptomyces virus Izzy, Streptomyces virus Lannister, Streptomyces virus Lika, Streptomyces virus Sujidade, Streptomyces virus Zemlya, Streptomyces virus phiHau3, Mycobacterium virus Acadian, Mycobacterium virus Baee, Mycobacterium virus Reprobate, Mycobacterium virus Adawi, Mycobacterium virus Bane 1, Mycobacterium virus BrownCNA, Mycobacterium virus Chrisnmich, Mycobacterium virus Cooper, Mycobacterium virus JAMaL, Mycobacterium virus Nigel, Mycobacterium virus Stinger, Mycobacterium virus Vincenzo, Mycobacterium virus Zemanar, Mycobacterium virus Apizium, Mycobacterium virus Manad, Mycobacterium virus Oline, Mycobacterium virus Osmaximus, Mycobacterium virus Pg1, Mycobacterium virus Soto, Mycobacterium virus Suffolk, Mycobacterium virus Athena, Mycobacterium virus Bernardo, Mycobacterium virus Gadjet, Mycobacterium virus Pipefish, Mycobacterium virus Godines, Mycobacterium virus Rosebush, Mycobacterium virus TA17a, Mycobacterium virus Babsiella, Mycobacterium virus Brujita, Mycobacterium virus Hawkeye, Mycobacterium virus Plot, Caulobacter virus CcrBL9, Caulobacter virus CcrSC, Caulobacter virus CcrColossus, Caulobacter virus CcrPW, Caulobacter virus CcrBL10, Caulobacter virus CcrRogue, Caulobacter virus phiCbK, Caulobacter virus Swift, Salmonella virus SP31, Salmonella virus AG11, Salmonella virus Ent1, Salmonella virus f18SE, Salmonella virus Jersey, Salmonella virus L13, Salmonella virus LSPA1, Salmonella virus SE2, Salmonella virus SETP3, Salmonella virus SETP7, Salmonella virus SETP13, Salmonella virus SP101, Salmonella virus SS3e, Salmonella virus wksl3, Escherichia virus K1G, Escherichia virus K1H, Escherichia virus K1ind1, Escherichia virus K1ind2, Escherichia virus Golestan, Raoultella virus RP180, Gordonia virus Asapag, Gordonia virus BENtherdunthat, Gordonia virus Getalong, Gordonia virus Kenna, Gordonia virus Horus, Gordonia virus Phistory, Leuconostoc virus Lmd1, Leuconostoc virus LN03, Leuconostoc virus LN04, Leuconostoc virus LN12, Leuconostoc virus LN6B, Leuconostoc virus P793, Leuconostoc virus 1A4, Leuconostoc virus Ln8, Leuconostoc virus Ln9, Leuconostoc virus LN25, Leuconostoc virus LN34, Leuconostoc virus LNTR3, Mycobacterium virus Bongo, Mycobacterium virus Rey, Mycobacterium virus Butters, Mycobacterium virus Michelle, Mycobacterium virus Charlie, Mycobacterium virus Pipsqueaks, Mycobacterium virus Xeno, Mycobacterium virus Panchino, Mycobacterium virus Phrann, Mycobacterium virus Redi, Mycobacterium virus Skinnyp, Gordonia virus BaxterFox, Gordonia virus Yeezy, Gordonia virus Kita, Gordonia virus Nymphadora, Gordonia virus Zirinka, Mycobacterium virus Bignuz, Mycobacterium virus Brusacoram, Mycobacterium virus Donovan, Mycobacterium virus Fishburne, Mycobacterium virus Jebeks, Mycobacterium virus Malithi, Mycobacterium virus Phayonce, Lactobacillus virus B2, Lactobacillus virus lenus, Lactobacillus virus Nyseid, Lactobacillus virus SAC12, Lactobacillus virus Ldl1, Lactobacillus virus ViSo2018a, Lactobacillus virus Maenad, Lactobacillus virus P1, Lactobacillus virus Satyr, Streptomyces virus AbbeyMikolon, Pseudomonas virus Ab18, Pseudomonas virus Ab19, Pseudomonas virus PaMx11, Burkholderia virus AH2, Arthrobacter virus Amigo, Arthrobacteria virus Molivia, Propionibacterium virus Anatole, Propionibacterium virus B3, Arthrobacter virus Andrew, Bacillus virus Andromeda, Bacillus virus Blastoid, Bacillus virus Curly, Bacillus virus Eoghan, Bacillus virus Finn, Bacillus virus Glittering, Bacillus virus Riggi, Bacillus virus Taylor, Microbacterium virus Appa, Gordonia virus Apricot, Microbacterium virus Armstrong, Gordonia virus Attis, Streptomyces virus Attoomi, Streptomyces virus Austintatious, Streptomyces virus Ididsumtinwong, Streptomyces virus PapayaSalad, Gordonia virus Bantam, Mycobacterium virus Barnyard, Mycobacterium virus Konstantine, Mycobacterium virus Predator, Pseudomonas virus B3, Pseudomonas virus JBD67, Pseudomonas virus JD18, Pseudomonas virus PM105, Mycobacterium virus Bernal13, Gordonia virus BetterKatz, Streptomyces virus Bing, Staphylococcus virus 13, Staphylococcus virus 77, Staphylococcus virus 108PVL, Gordonia virus Bowser, Arthrobacter virus Bridgette, Arthrobacter virus Constance, Arthrobacter virus Eileen, Arthrobacter virus Judy, Arthrobacter virus Peas, Gordonia virus Britbrat, Mycobacterium virus Bron, Mycobacterium virus Faith1, Mycobacterium virus JoeDirt, Mycobacterium virus Rumpelstiltskin, Streptococcus virus 858, Streptococcus virus 2972, Streptococcus virus ALQ132, Streptococcus virus O1205, Streptococcus virus Sfi11, Pseudomonas virus D3112, Pseudomonas virus DMS3, Pseudomonas virus FHA0480, Pseudomonas virus LPB1, Pseudomonas virus MP22, Pseudomonas virus MP29, Pseudomonas virus MP38, Pseudomonas virus PA1KOR, Cellulophaga virus ST, Bacillus virus 250, Bacillus virus IEBH, Lactococcus virus bIL67, Lactococcus virus c2, Corynebacterium virus C3PO, Corynebacterium virus Darwin, Corynebacterium virus Zion, Lactobacillus virus c5, Lactobacillus virus Ld3, Lactobacillus virus Ld17, Lactobacillus virus Ld25A, Lactobacillus virus LLKu, Lactobacillus virus phiLdb, Mycobacterium virus Che9c, Mycobacterium virus Sbash, Mycobacterium virus Ardmore, Mycobacterium virus Avani, Mycobacterium virus Boomer, Mycobacterium virus Che8, Mycobacterium virus Che9d, Mycobacterium virus DeadP, Mycobacterium virus Dlane, Mycobacterium virus Dorothy, Mycobacterium virus DotProduct, Mycobacterium virus Drago, Mycobacterium virus Fruitloop, Mycobacterium virus GUmbie, Mycobacterium virus Ibhubesi, Mycobacterium virus Llij, Mycobacterium virus Mozy, Mycobacterium virus Mutaforma13, Mycobacterium virus Pacc40, Mycobacterium virus PMC, Mycobacterium virus Ramsey, Mycobacterium virus RockyHorror, Mycobacterium virus SG4, Mycobacterium virus Shauna1, Mycobacterium virus Shilan, Mycobacterium virus Spartacus, Mycobacterium virus Taj, Mycobacterium virus Tweety, Mycobacterium virus Wee, Mycobacterium virus Yoshi, Salmonella virus Chi, Salmonella virus FSLSP030, Salmonella virus FSLSP088, Salmonella virus iEPS5, Salmonella virus SPN19, Corynebacterium virus P1201, Clavibacter virus CMP1, Clavibacter virus CN1A, Lactobacillus virus ATCC8014, Lactobacillus virus phiJL1, Pediococcus virus cIP1, Arthrobacter virus Coral, Arthrobacter virus Kepler, Mycobacterium virus Corndog, Mycobacterium virus Firecracker, Rhodobacter virus RcCronus, Gordonia virus DareDevil, Arthrobacter virus Decurro, Stenotrophomonas virus DLP5, Gordonia virus Demosthenes, Gordonia virus Katyusha, Gordonia virus Kvothe, Pseudomonas virus D3, Pseudomonas virus PMG1, Escherichia virus EK99P1, Escherichia virus HK578, Escherichia virus JL1, Escherichia virus SSL2009a, Escherichia virus YD2008s, Shigella virus EP23, Sodalis virus SO1, Microbacterium virus Dismas, Propionibacterium virus B22, Propionibacterium virus Doucette, Propionibacterium virus E6, Propionibacterium virus G4, Microbacterium virus Eden, Enterococcus virus AL2, Enterococcus virus AL3, Enterococcus virus AUEF3, Enterococcus virus EcZZ2, Enterococcus virus EF3, Enterococcus virus EF4, Enterococcus virus EfaCPT1, Enterococcus virus IME196, Enterococcus virus LY0322, Enterococcus virus phiSHEF2, Enterococcus virus phiSHEF4, Enterococcus virus phiSHEF5, Enterococcus virus PMBT2, Enterococcus virus SANTOR1, Edwardsiella virus eiAU, Xanthomonas virus PhiL7, Microbacterium virus Eleri, Gordonia virus Cozz, Gordonia virus Emalyn, Gordonia virus GTE2, Gordonia virus Troje, Gordonia virus Eyre, Gordonia virus Fairfaxidumvirus, Microbacterium virus ISF9, Erwinia virus Eho49, Erwinia virus Eho59, Staphylococcus virus 2638A, Staphylococcus virus QT1, Colwellia virus 9A, Mycobacterium virus Alma, Mycobacterium virus Arturo, Mycobacterium virus Astro, Mycobacterium virus Backyardigan, Mycobacterium virus Benedict, Mycobacterium virus Bethlehem, Mycobacterium virus Billknuckles, Mycobacterium virus BPBiebs31, Mycobacterium virus Bruns, Mycobacterium virus Bxb1, Mycobacterium virus Bxz2, Mycobacterium virus Che12, Mycobacterium virus Cuco, Mycobacterium virus D29, Mycobacterium virus Doom, Mycobacterium virus Ericb, Mycobacterium virus Euphoria, Mycobacterium virus George, Mycobacterium virus Gladiator, Mycobacterium virus Goose, Mycobacterium virus Hammer, Mycobacterium virus Heldan, Mycobacterium virus Jasper, Mycobacterium virus JC27, Mycobacterium virus Jeffabunny, Mycobacterium virus JHC117, Mycobacterium virus KBG, Mycobacterium virus Kssjeb, Mycobacterium virus Kugel, Mycobacterium virus L5, Mycobacterium virus Lesedi, Mycobacterium virus LHTSCC, Mycobacterium virus lockley, Mycobacterium virus Marcell, Mycobacterium virus Microwolf, Mycobacterium virus Mrgordo, Mycobacterium virus Museum, Mycobacterium virus Nepal, Mycobacterium virus Packman, Mycobacterium virus Peaches, Mycobacterium virus Perseus, Mycobacterium virus Pukovnik, Mycobacterium virus Rebeuca, Mycobacterium virus Redrock, Mycobacterium virus Ridgecb, Mycobacterium virus Rockstar, Mycobacterium virus Saintus, Mycobacterium virus Skipole, Mycobacterium virus Solon, Mycobacterium virus Switzer, Mycobacterium virus SWU1, Mycobacterium virus Tiger, Mycobacterium virus Timshel, Mycobacterium virus Trixie, Mycobacterium virus Turbido, Mycobacterium virus Twister, Mycobacterium virus U2, Mycobacterium virus Violet, Mycobacterium virus Wonder, Mycobacterium virus Gaia, Arthrobacter virus Abidatro, Arthrobacter virus Galaxy, Gordonia virus GAL1, Gordonia virus GMA3, Gordonia virus Gsput1, Gordonia virus GMA7, Gordonia virus GTE7, Gordonia virus Ghobes, Mycobacterium virus Giles, Microbacterium virus OneinaGillian, Gordonia virus GodonK, Microbacterium virus Goodman, Arthrobacter virus Captnmurica, Arthrobacter virus Gordon, Gordonia virus GordTnk2, Proteus virus Isfahan, Gordonia virus Jumbo, Gordonia virus Gustav, Gordonia virus Mahdia, Paenibacillus virus Harrison, Gordonia virus Hedwig, Cellulophaga virus Cba121, Cellulophaga virus Cba171, Cellulophaga virus Cba181, Escherichia virus HK022, Escherichia virus HK75, Escherichia virus HK97, Escherichia virus HK106, Escherichia virus HK446, Escherichia virus HK542, Escherichia virus HK544, Escherichia virus HK633, Escherichia virus mEp234, Escherichia virus mEpX1, Escherichia virus mEpX2, Streptomyces virus Hiyaa, Salinibacter virus M1EM1, Salinibacter virus M8CR30-2, Listeria virus LP26, Listeria virus LP37, Listeria virus LP110, Listeria virus LP114, Listeria virus P70, Corynebacterium virus phi673, Corynebacterium virus phi674, Microbacterium virus Hamlet, Microbacterium virus Ilzat, Polaribacter virus P12002L, Polaribacter virus P12002S, Nonlabens virus P12024L, Nonlabens virus P12024S, Gordonia virus Jace, Brevibacillus virus Jenst, Corynebacterium virus Juicebox, Salinibacter virus M31CR41-2, Salinibacter virus SRUTV1, Arthrobacter virus Kellezzio, Arthrobacter virus Kitkat, Burkholderia virus KL1, Xanthomonas virus CP1, Microbacterium virus Golden, Microbacterium virus Koji, Arthrobacter virus Bennie, Arthrobacter virus DrRobert, Arthrobacter virus Glenn, Arthrobacter virus HunterDalle, Arthrobacter virus Joann, Arthrobacter virus Korra, Arthrobacter virus Preamble, Arthrobacter virus Pumancara, Arthrobacter virus Wayne, Mycobacterium virus 244, Mycobacterium virus Bask21, Mycobacterium virus CJW1, Mycobacterium virus Eureka, Mycobacterium virus Kostya, Mycobacterium virus Porky, Mycobacterium virus Pumpkin, Mycobacterium virus Sirduracell, Mycobacterium virus Toto, Microbacterium virus Krampus, Salinibacter virus M8CC19, Salinibacter virus M8CRM1, Sphingobium virus Lacusarx, Escherichia virus DE3, Escherichia virus HK629, Escherichia virus HK630, Escherichia virus Lambda, Pseudomonas virus Lana, Arthrobacter virus Laroye, Eggerthella virus PMBT5, Arthrobacter virus Liebe, Mycobacterium virus Halo, Mycobacterium virus Liefie, Acinetobacter virus IMEAB3, Acinetobacter virus Loki, Streptomyces virus phiBTI, Streptomyces virus phiC31, Brevibacterium virus LuckyBarnes, Gordonia virus Lucky10, Faecalibacterium virus Lugh, Bacillus virus BMBtp2, Bacillus virus TP21, Bacillus virus Mgbh1, Arthrobacter virus Maja, Arthrobacter virus DrManhattan, Mycobacterium virus Ff47, Mycobacterium virus Muddy, Vibrio virus MAR10, Vibrio virus SSP002, Mycobacterium virus Marvin, Mycobacterium virus Mosmoris, Pseudomonas virus PMBT3, Microbacterium virus MementoMori, Microbacterium virus Fireman, Microbacterium virus Metamorphoo, Microbacterium virus RobsFeet, Microbacterium virus Mini, Streptococcus virus 7201, Streptococcus virus DT1, Streptococcus virus phiAbc2, Streptococcus virus Sfi19, Streptococcus virus Sfi21, Gordonia virus Birksandsocks, Gordonia virus Flakey, Gordonia virus Monty, Gordonia virus Stevefrench, Arthrobacter virus Circum, Arthrobacter virus Mudcat, Escherichia virus EC2, Salmonella virus Lumpael, Dinoroseobacter virus D5C, Burkholderia virus BcepNazgul, Microbacterium virus Neferthena, Pseudomonas virus nickie, Pseudomonas virus NP1, Pseudomonas virus PaMx25, Escherichia virus 9g, Escherichia virus JenK1, Escherichia virus JenP1, Escherichia virus JenP2, Salmonella virus SE1Kor, Salmonella virus 9NA, Salmonella virus SP069, Gordonia virus Nyceirae, Faecalibacterium virus Oengus, Mycobacterium virus Baka, Mycobacterium virus Courthouse, Mycobacterium virus Littlee, Mycobacterium virus Omega, Mycobacterium virus Optimus, Mycobacterium virus Thibault, Gordonia virus BrutonGaster, Gordonia virus OneUp, Gordonia virus Orchid, Thermus virus P23-45, Thermus virus P74-26, Propionibacterium virus ATCC29399BC, Propionibacterium virus ATCC29399BT, Propionibacterium virus Attacne, Propionibacterium virus Keiki, Propionibacterium virus Kubed, Propionibacterium virus Lauchelly, Propionibacterium virus MrAK, Propionibacterium virus Ouroboros, Propionibacterium virus P91, Propionibacterium virus P105, Propionibacterium virus P144, Propionibacterium virus P1001, Propionibacterium virus P1.1, Propionibacterium virus P100A, Propionibacterium virus P100D, Propionibacterium virus P101A, Propionibacterium virus P104A, Propionibacterium virus PA6, Propionibacterium virus Pacnes201215, Propionibacterium virus PAD20, Propionibacterium virus PAS50, Propionibacterium virus PHL009M11, Propionibacterium virus PHL025M00, Propionibacterium virus PHL037M02, Propionibacterium virus PHL041M10, Propionibacterium virus PHL060L00, Propionibacterium virus PHL067M01, Propionibacterium virus PHL070N00, Propionibacterium virus PHL071N05, Propionibacterium virus PHL082M03, Propionibacterium virus PHL092M00, Propionibacterium virus PHL095N00, Propionibacterium virus PHL111M01, Propionibacterium virus PHL112N00, Propionibacterium virus PHL113M01, Propionibacterium virus PHL114L00, Propionibacterium virus PHL116M00, Propionibacterium virus PHL117M00, Propionibacterium virus PHL117M01, Propionibacterium virus PHL132N00, Propionibacterium virus PHL141N00, Propionibacterium virus PHL151M00, Propionibacterium virus PHL151N00, Propionibacterium virus PHL152M00, Propionibacterium virus PHL163M00, Propionibacterium virus PHL171M01, Propionibacterium virus PHL179M00, Propionibacterium virus PHL194M00, Propionibacterium virus PHL199M00, Propionibacterium virus PHL301M00, Propionibacterium virus PHL308M00, Propionibacterium virus Pirate, Propionibacterium virus Procrass1, Propionibacterium virus SKKY, Propionibacterium virus Solid, Propionibacterium virus Stormborn, Propionibacterium virus Wizzo, Pseudomonas virus PaMx28, Pseudomonas virus PaMx74, Mycobacterium virus Papyrus, Mycobacterium virus Send513, Mycobacterium virus Patience, Mycobacterium virus PBI1, Rhodococcus virus Pepy6, Rhodococcus virus Poco6, Staphylococcus virus 11, Staphylococcus virus 29, Staphylococcus virus 37, Staphylococcus virus 53, Staphylococcus virus 55, Staphylococcus virus 69, Staphylococcus virus 71, Staphylococcus virus 80, Staphylococcus virus 85, Staphylococcus virus 88, Staphylococcus virus 92, Staphylococcus virus 96, Staphylococcus virus 187, Staphylococcus virus 52a, Staphylococcus virus 80alpha, Staphylococcus virus CNPH82, Staphylococcus virus EW, Staphylococcus virus IPLA5, Staphylococcus virus IPLA7, Staphylococcus virus IPLA88, Staphylococcus virus PH15, Staphylococcus virus phiETA, Staphylococcus virus phiETA2, Staphylococcus virus phiETA3, Staphylococcus virus phiMR11, Staphylococcus virus phiMR25, Staphylococcus virus phiNM1, Staphylococcus virus phiNM2, Staphylococcus virus phiNM4, Staphylococcus virus SAP26, Staphylococcus virus X2, Enterococcus virus FL1, Enterococcus virus FL2, Enterococcus virus FL3, Streptomyces virus Picard, Microbacterium virus Pikmin, Corynebacterium virus Poushou, Providencia virus PR1, Listeria virus LP302, Listeria virus PSA, Psimunavirus psiM2, Propionibacterium virus PFR1, Microbacterium phage KaiHaiDragon, Microbacterium phage Paschalis, Microbacterium phage Quhwah, Streptomyces virus Darolandstone, Streptomyces virus Raleigh, Escherichia virus N15, Rhodococcus virus RER2, Rhizobium virus P106B, Streptomyces virus Drgrey, Streptomyces virus Rima, Microbacterium virus Hendrix, Gordonia virus Fryberger, Gordonia virus Ronaldo, Aeromonas virus pIS4A, Streptomyces virus Rowa, Gordonia virus Ruthy, Streptomyces virus Jay2Jay, Streptomyces virus Mildred21, Streptomyces virus NootNoot, Streptomyces virus Paradiddles, Streptomyces virus Peebs, Streptomyces virus Samisti12, Pseudomonas virus SM1, Corynebacterium virus SamW, Xylella virus Salvo, Xylella virus Sano, Caulobacter virus Sansa, Enterococcus virus BC611, Enterococcus virus IMEEF1, Enterococcus virus SAP6, Enterococcus virus VD13, Streptococcus virus SPQS1, Salmonella virus Sasha, Corynebacterium virus BFK20, Geobacillus virus Tp84, Streptomyces virus Scap1, Gordonia virus Schnabeltier, Microbacterium virus Schubert, Pseudomonas virus 73, Pseudomonas virus Ab26, Pseudomonas virus Kakheti25, Escherichia virus Cajan, Escherichia virus Seurat, Caulobacter virus Seuss, Staphylococcus virus SEP9, Staphylococcus virus Sextaec, Paenibacillus virus Diva, Paenibacillus virus Hb10c2, Paenibacillus virus Rani, Paenibacillus virus Shelly, Paenibacillus virus Sitara, Paenibacillus virus Willow, Lactococcus virus 712, Lactococcus virus ASCC191, Lactococcus virus ASCC273, Lactococcus virus ASCC281, Lactococcus virus ASCC465, Lactococcus virus ASCC532, Lactococcus virus Bibb29, Lactococcus virus bIL170, Lactococcus virus CB13, Lactococcus virus CB14, Lactococcus virus CB19, Lactococcus virus CB20, Lactococcus virus jj50, Lactococcus virus P2, Lactococcus virus P008, Lactococcus virus sk1, Lactococcus virus S14, Bacillus virus Slash, Bacillus virus Stahl, Bacillus virus Staley, Bacillus virus Stills, Gordonia virus Bachita, Gordonia virus ClubL, Gordonia virus Smoothie, Arthrobacter virus Sonali, Gordonia virus Soups, Gordonia virus Strosahl, Gordonia virus Wait, Gordonia virus Sour, Bacillus virus SPbeta, Microbacterium virus Hyperion, Microbacterium virus Squash, Burkholderia virus phi6442, Burkholderia virus phi1026b, Burkholderia virus phiE125, Achromobacter virus 83-24, Achromobacter virus JWX, Arthrobacter virus Tank, Gordonia virus Suzy, Gordonia virus Terapin, Streptomyces virus TG1, Mycobacterium virus Anaya, Mycobacterium virus Angelica, Mycobacterium virus CrimD, Mycobacterium virus Fionnbharth, Mycobacterium virus JAWS, Mycobacterium virus Larva, Mycobacterium virus MacnCheese, Mycobacterium virus Pixie, Mycobacterium virus TM4, Tsukamurella virus TIN2, Tsukamurella virus TIN3, Tsukamurella virus TIN4, Rhodobacter virus RcSpartan, Rhodobacter virus RcTitan, Mycobacterium virus Tortellini, Staphylococcus virus 47, Staphylococcus virus 3a, Staphylococcus virus 42e, Staphylococcus virus IPLA35, Staphylococcus virus phi12, Staphylococcus virus phiSLT, Mycobacterium virus 32HC, Rhodococcus virus Trina, Gordonia virus Trine, Paenibacillus virus Tripp, Flavobacterium virus 1H, Flavobacterium virus 23T, Flavobacterium virus 2A, Flavobacterium virus 6H, Streptomyces virus Lilbooboo, Streptomyces virus Vash, Paenibacillus virus Vegas, Gordonia virus Vendetta, Paracoccus virus Shpa, Pantoea virus Vid5, Acinetobacter virus B1251, Acinetobacter virus R3177, Gordonia virus Brandonk123, Gordonia virus Lennon, Gordonia virus Vivi2, Bordetella virus CN1, Bordetella virus CN2, Bordetella virus FP1, Bordetella virus MW2, Bacillus virus Wbeta, Rhodococcus virus Weasel, Mycobacterium virus Wildcat, Gordonia virus Billnye, Gordonia virus Twister6, Gordonia virus Wizard, Gordonia virus Hotorobo, Gordonia virus Woes, Streptomyces virus TP1604, Streptomyces virus YDN12, Roseobacter virus RDJL1, Roseobacter virus RDJL2, Xanthomonas virus OP1, Xanthomonas virus Xop411, Xanthomonas virus Xp10, Arthrobacter virus Yang, Alphaproteobacteria virus phiJ1001, Pseudomonas virus LKO4, Pseudomonas virus M6, Pseudomonas virus MP1412, Pseudomonas virus PAE1, Pseudomonas virus Yua, Gordonia virus Yvonnetastic, Microbacterium virus Zeta1847, Rhodococcus virus RGL3, Paenibacillus virus Lily, Vibrio virus CTXphi, Propionibacterium virus B5, Vibrio virus KSF1, Xanthomonas virus Cf1c, Vibrio virus fs1, Vibrio virus VGJ, Ralstonia virus RS551, Ralstonia virus RS603, Ralstonia virus RSM1, Ralstonia virus RSM3, Escherichia virus If1, Escherichia virus M13, Escherichia virus 122, Salmonella virus IKe, Ralstonia virus PE226, Pseudomonas virus Pf1, Stenotrophomonas virus PSH1, Ralstonia virus RSS1, Vibrio virus fs2, Vibrio virus VFJ, Stenotrophomonas virus SMA6, Stenotrophomonas virus SMA9, Stenotrophomonas virus SMA7, Pseudomonas virus Pf3, Thermus virus OH3, Vibrio virus VfO3K6, Vibrio virus VCY, Vibrio virus Vf33, Xanthomonas virus Xf109, Acholeplasma virus L51, Spiroplasma virus SVTS2, Spiroplasma virus C74, Spiroplasma virus R8A2B, Spiroplasma virus SkV1CR23x, Escherichia virus alpha3, Escherichia virus ID21, Escherichia virus ID32, Escherichia virus ID62, Escherichia virus NC28, Escherichia virus NC29, Escherichia virus NC35, Escherichia virus phiK, Escherichia virus St1, Escherichia virus WA45, Escherichia virus G4, Escherichia virus ID52, Escherichia virus Talmos, Escherichia virus phiX174, Bdellovibrio virus MAC1, Bdellovibrio virus MH2K, Chlamydia virus Chp1, Chlamydia virus Chp2, Chlamydia virus CPAR39, Chlamydia virus CPG1, Spiroplasma virus SpV4, Bombyx mori bidensovirus, Acerodon celebensis polyomavirus 1, Artibeus planirostris polyomavirus 2, Artibeus planirostris polyomavirus 3, Ateles paniscus polyomavirus 1, Cardioderma cor polyomavirus 1, Carollia perspicillata polyomavirus 1, Chlorocebus pygerythrus polyomavirus 1, Chlorocebus pygerythrus polyomavirus 3, Dobsonia moluccensis polyomavirus 1, Eidolon helvum polyomavirus 1, Gorilla gorilla polyomavirus 1, Human polyomavirus 5, Human polyomavirus 8, Human polyomavirus 9, Human polyomavirus 13, Human polyomavirus 14, Macaca fascicularis polyomavirus 1, Mesocricetus auratus polyomavirus 1, Miniopterus schreibersii polyomavirus 1, Miniopterus schreibersii polyomavirus 2, Molossus molossus polyomavirus 1, Mus musculus polyomavirus 1, Otomops martiensseni polyomavirus 1, Otomops martiensseni polyomavirus 2, Pan troglodytes polyomavirus 1, Pan troglodytes polyomavirus 2, Pan troglodytes polyomavirus 3, Pan troglodytes polyomavirus 4, Pan troglodytes polyomavirus 5, Pan troglodytes polyomavirus 6, Pan troglodytes polyomavirus 7, Papio cynocephalus polyomavirus 1, Piliocolobus badius polyomavirus 1, Piliocolobus rufomitratus polyomavirus 1, Pongo abelii polyomavirus 1, Pongo pygmaeus polyomavirus 1, Procyon lotor polyomavirus 1, Pteropus vampyrus polyomavirus 1, Rattus norvegicus polyomavirus 1, Sorex araneus polyomavirus 1, Sorex coronatus polyomavirus 1, Sorex minutus polyomavirus 1, Sturnira lilium polyomavirus 1, Tupaia belangeri polyomavirus 1, Acerodon celebensis polyomavirus 2, Artibeus planirostris polyomavirus 1, Canis familiaris polyomavirus 1, Cebus albifrons polyomavirus 1, Cercopithecus erythrotis polyomavirus 1, Chlorocebus pygerythrus polyomavirus 2, Desmodus rotundus polyomavirus 1, Dobsonia moluccensis polyomavirus 2, Dobsonia moluccensis polyomavirus 3, Enhydra lutris polyomavirus 1, Equus caballus polyomavirus 1, Human polyomavirus 1, Human polyomavirus 2, Human polyomavirus 3, Human polyomavirus 4, Leptonychotes weddellii polyomavirus 1, Loxodonta africana polyomavirus 1, Macaca mulatta polyomavirus 1, Mastomys natalensis polyomavirus 1, Meles meles polyomavirus 1, Microtus arvalis polyomavirus 1, Miniopterus africanus polyomavirus 1, Mus musculus polyomavirus 2, Mus musculus polyomavirus 3, Myodes glareolus polyomavirus 1, Myotis lucifugus polyomavirus 1, Pan troglodytes polyomavirus 8, Papio cynocephalus polyomavirus 2, Pteronotus davyi polyomavirus 1, Pteronotus parnellii polyomavirus 1, Rattus norvegicus polyomavirus 2, Rousettus aegyptiacus polyomavirus 1, Saimiri boliviensis polyomavirus 1, Saimiri sciureus polyomavirus 1, Vicugna pacos polyomavirus 1, Zalophus californianus polyomavirus 1, Human polyomavirus 6, Human polyomavirus 7, Human polyomavirus 10, Human polyomavirus 11, Anser anser polyomavirus 1, Aves polyomavirus 1, Corvus monedula polyomavirus 1, Cracticus torquatus polyomavirus 1, Erythrura gouldiae polyomavirus 1, Lonchura maja polyomavirus 1, Pygoscelis adeliae polyomavirus 1, Pyrrhula pyrrhula polyomavirus 1, Serinus canaria polyomavirus 1, Ailuropoda melanoleuca polyomavirus 1, Bos taurus polyomavirus 1, Centropristis striata polyomavirus 1, Delphinus delphis polyomavirus 1, Procyon lotor polyomavirus 2, Rhynchobatus djiddensis polyomavirus 1, Sparus aurata polyomavirus 1, Trematomus bernacchii polyomavirus 1, Trematomus pennellii polyomavirus 1, Alphapapillomavirus 1, Alphapapillomavirus 2, Alphapapillomavirus 3, Alphapapillomavirus 4, Alphapapillomavirus 5, Alphapapillomavirus 6, Alphapapillomavirus 7, Alphapapillomavirus 8, Alphapapillomavirus 9, Alphapapillomavirus 10, Alphapapillomavirus 11, Alphapapillomavirus 12, Alphapapillomavirus 13, Alphapapillomavirus 14, Betapapillomavirus 1, Betapapillomavirus 2, Betapapillomavirus 3, Betapapillomavirus 4, Betapapillomavirus 5, Betapapillomavirus 6, Chipapillomavirus 1, Chipapillomavirus 2, Chipapillomavirus 3, Deltapapillomavirus 1, Deltapapillomavirus 2, Deltapapillomavirus 3, Deltapapillomavirus 4, Deltapapillomavirus 5, Deltapapillomavirus 6, Deltapapillomavirus 7, Dyochipapillomavirus 1, Dyodeltapapillomavirus 1, Dyoepsilonpapillomavirus 1, Dyoetapapillomavirus 1, Dyoiotapapillomavirus 1, Dyoiotapapillomavirus 2, Dyokappapapillomavirus 1, Dyokappapapillomavirus 2, Dyokappapapillomavirus 3, Dyokappapapillomavirus 4, Dyokappapapillomavirus 5, Dyolambdapapillomavirus 1, Dyomupapillomavirus 1, Dyonupapillomavirus 1, Dyoomegapapillomavirus 1, Dyoomikronpapillomavirus 1, Dyophipapillomavirus 1, Dyopipapillomavirus 1, Dyopsipapillomavirus 1, Dyorhopapillomavirus 1, Dyosigmapapillomavirus 1, Dyotaupapillomavirus 1, Dyothetapapillomavirus 1, Dyoupsilonpapillomavirus 1, Dyoxipapillomavirus 1, Dyoxipapillomavirus 2, Dyozetapapillomavirus 1, Epsilonpapillomavirus 1, Epsilonpapillomavirus 2, Etapapillomavirus 1, Gammapapillomavirus 1, Gammapapillomavirus 2, Gammapapillomavirus 3, Gammapapillomavirus 4, Gammapapillomavirus 5, Gammapapillomavirus 6, Gammapapillomavirus 7, Gammapapillomavirus 8, Gammapapillomavirus 9, Gammapapillomavirus 10, Gammapapillomavirus 11, Gammapapillomavirus 12, Gammapapillomavirus 13, Gammapapillomavirus 14, Gammapapillomavirus 15, Gammapapillomavirus 16, Gammapapillomavirus 17, Gammapapillomavirus 18, Gammapapillomavirus 19, Gammapapillomavirus 20, Gammapapillomavirus 21, Gammapapillomavirus 22, Gammapapillomavirus 23, Gammapapillomavirus 24, Gammapapillomavirus 25, Gammapapillomavirus 26, Gammapapillomavirus 27, Iotapapillomavirus 1, Iotapapillomavirus 2, Kappapapillomavirus 1, Kappapapillomavirus 2, Lambdapapillomavirus 1, Lambdapapillomavirus 2, Lambdapapillomavirus 3, Lambdapapillomavirus 4, Lambdapapillomavirus 5, Mupapillomavirus 1, Mupapillomavirus 2, Mupapillomavirus 3, Nupapillomavirus 1, Omegapapillomavirus 1, Omikronpapillomavirus 1, Phipapillomavirus 1, Pipapillomavirus 1, Pipapillomavirus 2, Psipapillomavirus 1, Psipapillomavirus 2, Psipapillomavirus 3, Rhopapillomavirus 1, Rhopapillomavirus 2, Sigmapapillomavirus 1, Taupapillomavirus 1, Taupapillomavirus 2, Taupapillomavirus 3, Taupapillomavirus 4, Thetapapillomavirus 1, Treisdeltapapillomavirus 1, Treisepsilonpapillomavirus 1, Treisetapapillomavirus 1, Treisiotapapillomavirus 1, Treiskappapapillomavirus 1, Treisthetapapillomavirus 1, Treiszetapapillomavirus 1, Upsilonpapillomavirus 1, Upsilonpapillomavirus 2, Upsilonpapillomavirus 3, Xipapillomavirus 1, Xipapillomavirus 2, Xipapillomavirus 3, Xipapillomavirus 4, Xipapillomavirus 5, Zetapapillomavirus 1, Alefpapillomavirus 1, Asteroid aquambidensovirus 1, Decapod aquambidensovirus 1, Blattodean blattambidensovirus 1, Hemipteran hemiambidensovirus 1, Hemipteran hemiambidensovirus 2, Lepidopteran iteradensovirus 1, Lepidopteran iteradensovirus 2, Lepidopteran iteradensovirus 3, Lepidopteran iteradensovirus 4, Lepidopteran iteradensovirus 5, Orthopteran miniambidensovirus 1, Blattodean pefuambidensovirus 1, Dipteran protoambidensovirus 1, Lepidopteran protoambidensovirus 1, Hemipteran scindoambidensovirus 1, Hymenopteran scindoambidensovirus 1, Orthopteran scindoambidensovirus 1, Dipteran brevihamaparvovirus 1, Dipteran brevihamaparvovirus 2, Carnivore chaphamaparvovirus 1, Chiropteran chaphamaparvovirus 1, Galliform chaphamaparvovirus 1, Galliform chaphamaparvovirus 2, Galliform chaphamaparvovirus 3, Rodent chaphamaparvovirus 1, Rodent chaphamaparvovirus 2, Ungulate chaphamaparvovirus 1, Decapod hepanhamaparvovirus 1, Syngnathid ichthamaparvovirus 1, Decapod penstylhamaparvovirus 1, Carnivore amdoparvovirus 1, Carnivore amdoparvovirus 2, Carnivore amdoparvovirus 3, Carnivore amdoparvovirus 4, Carnivore amdoparvovirus 5, Chiropteran artiparvovirus 1, Galliform aveparvovirus 1, Gruiform aveparvovirus 1, Carnivore bocaparvovirus 1, Carnivore bocaparvovirus 2, Carnivore bocaparvovirus 3, Carnivore bocaparvovirus 4, Carnivore bocaparvovirus 5, Carnivore bocaparvovirus 6, Chiropteran bocaparvovirus 1, Chiropteran bocaparvovirus 2, Chiropteran bocaparvovirus 3, Chiropteran bocaparvovirus 4, Lagomorph bocaparvovirus 1, Pinniped bocaparvovirus 1, Pinniped bocaparvovirus 2, Primate bocaparvovirus 1, Primate bocaparvovirus 2, Rodent bocaparvovirus 1, Rodent bocaparvovirus 2, Ungulate bocaparvovirus 1, Ungulate bocaparvovirus 2, Ungulate bocaparvovirus 3, Ungulate bocaparvovirus 4, Ungulate bocaparvovirus 5, Ungulate bocaparvovirus 6, Ungulate bocaparvovirus 7, Ungulate bocaparvovirus 8, Pinniped copiparvovirus 1, Ungulate copiparvovirus 1, Ungulate copiparvovirus 2, Ungulate copiparvovirus 3, Ungulate copiparvovirus 4, Ungulate copiparvovirus 5, Ungulate copiparvovirus 6, Adeno-associated dependoparvovirus A, Adeno-associated dependoparvovirus B, Anseriform dependoparvovirus 1, Avian dependoparvovirus 1, Chiropteran dependoparvovirus 1, Pinniped dependoparvovirus 1, Rodent dependoparvovirus 1, Rodent dependoparvovirus 2, Squamate dependoparvovirus 1, Squamate dependoparvovirus 2, Pinniped erythroparvovirus 1, Primate erythroparvovirus 1, Primate erythroparvovirus 2, Primate erythroparvovirus 3, Primate erythroparvovirus 4, Rodent erythroparvovirus 1, Ungulate erythroparvovirus 1, Primate loriparvovirus 1, Carnivore protoparvovirus, Carnivore protoparvovirus 1, Chiropteran protoparvovirus 1, Eulipotyphla protoparvovirus 1, Primate protoparvovirus 1, Primate protoparvovirus 2, Primate protoparvovirus 3, Primate protoparvovirus 4, Rodent protoparvovirus 1, Rodent protoparvovirus 2, Rodent protoparvovirus 3, Ungulate protoparvovirus 1, Ungulate protoparvovirus 2, Chiropteran tetraparvovirus 1, Primate tetraparvovirus 1, Ungulate tetraparvovirus 1, Ungulate tetraparvovirus 2, Ungulate tetraparvovirus 3, Ungulate tetraparvovirus 4, Chaetoceros diatodnavirus 1, Avon-Heathcote Estuary associated kieseladnavirus, Chaetoceros protobacilladnavirus 1, Chaetoceros protobacilladnavirus 2, Chaetoceros protobacilladnavirus 3, Chaetoceros protobacilladnavirus 4, Marine protobacilladnavirus 1, Snail associated protobacilladnavirus 1, Snail associated protobacilladnavirus 2, Barbel circovirus, Bat associated circovirus 1, Bat associated circovirus 2, Bat associated circovirus 3, Bat associated circovirus 4, Bat associated circovirus 5, Bat associated circovirus 6, Bat associated circovirus 7, Bat associated circovirus 8, Bat associated circovirus 9, Bat associated circovirus 10, Bat associated circovirus 11, Bat associated circovirus 12, Beak and feather disease virus, Canary circovirus, Canine circovirus, Chimpanzee associated circovirus 1, Civet circovirus, Duck circovirus, European catfish circovirus, Finch circovirus, Goose circovirus, Gull circovirus, Human associated circovirus 1, Mink circovirus, Mosquito associated circovirus 1, Pigeon circovirus, Porcine circovirus 1, Porcine circovirus 2, Porcine circovirus 3, Raven circovirus, Rodent associated circovirus 1, Rodent associated circovirus 2, Rodent associated circovirus 3, Rodent associated circovirus 4, Rodent associated circovirus 5, Rodent associated circovirus 6, Rodent associated circovirus 7, Starling circovirus, Swan circovirus, Tick associated circovirus 1, Tick associated circovirus 2, Zebra finch circovirus, Ant associated cyclovirus 1, Bat associated cyclovirus 1, Bat associated cyclovirus 2, Bat associated cyclovirus 3, Bat associated cyclovirus 4, Bat associated cyclovirus 5, Bat associated cyclovirus 6, Bat associated cyclovirus 7, Bat associated cyclovirus 8, Bat associated cyclovirus 9, Bat associated cyclovirus 10, Bat associated cyclovirus 11, Bat associated cyclovirus 12, Bat associated cyclovirus 13, Bat associated cyclovirus 14, Bat associated cyclovirus 15, Bat associated cyclovirus 16, Bovine associated cyclovirus 1, Chicken associated cyclovirus 1, Chicken associated cyclovirus 2, Chimpanzee associated cyclovirus 1, Cockroach associated cyclovirus 1, Dragonfly associated cyclovirus 1, Dragonfly associated cyclovirus 2, Dragonfly associated cyclovirus 3, Dragonfly associated cyclovirus 4, Dragonfly associated cyclovirus 5, Dragonfly associated cyclovirus 6, Dragonfly associated cyclovirus 7, Dragonfly associated cyclovirus 8, Duck associated cyclovirus 1, Feline associated cyclovirus 1, Goat associated cyclovirus 1, Horse associated cyclovirus 1, Human associated cyclovirus 1, Human associated cyclovirus 2, Human associated cyclovirus 3, Human associated cyclovirus 4, Human associated cyclovirus 5, Human associated cyclovirus 6, Human associated cyclovirus 7, Human associated cyclovirus 8, Human associated cyclovirus 9, Human associated cyclovirus 10, Human associated cyclovirus 11, Human associated cyclovirus 12, Mouse associated cyclovirus 1, Rodent associated cyclovirus 1, Rodent associated cyclovirus 2, Spider associated cyclovirus 1, Squirrel associated cyclovirus 1, Bovine associated bovismacovirus 1, Bovine associated bovismacovirus 2, Dragonfly associated bovismacovirus 1, Bovine associated cosmacovirus 1, Dragonfly associated dragsmacovirus 1, Bovine associated drosmacovirus 1, Camel associated drosmacovirus 1, Camel associated drosmacovirus2, Bovine associated huchismacovirus 1, Bovine associated huchismacovirus 2, Chicken associated huchismacovirus 1, Chicken associated huchismacovirus 2, Human associated huchismacovirus 1, Human associated huchismacovirus 2, Human associated huchismacovirus 3, Bovine associated porprismacovirus 1, Camel associated porprismacovirus 1, Camel associated porprismacovirus 2, Camel associated porprismacovirus 3, Camel associated porprismacovirus 4, Chimpanzee associated porprismacovirus 1, Chimpanzee associated porprismacovirus 2, Gorilla associated porprismacovirus 1, Howler monkey associated porprismacovirus 1, Human associated porprismacovirus 1, Human associated porprismacovirus 2, Lemur associated porprismacovirus 1, Porcine associated porprismacovirus 1, Porcine associated porprismacovirus 2, Porcine associated porprismacovirus 3, Porcine associated porprismacovirus 4, Porcine associated porprismacovirus 5, Porcine associated porprismacovirus 6, Porcine associated porprismacovirus 7, Porcine associated porprismacovirus 8, Porcine associated porprismacovirus 9, Porcine associated porprismacovirus 10, Rat associated porprismacovirus 1, Sheep associated porprismacovirus 1, Sheep associated porprismacovirus 2, Sheep associated porprismacovirus 3, Turkey associated porprismacovirus 1, Abaca bunchy top virus, Banana bunchy top virus, Cardamom bushy dwarf virus, Black medic leaf roll virus, Faba bean necrotic stunt virus, Faba bean necrotic yellows virus, Faba bean yellow leaf virus, Milk vetch dwarf virus, Pea necrotic yellow dwarf virus, Pea yellow stunt virus, Subterranean clover stunt virus, Coconut foliar decay virus, Brisavirus, Vientovirus, Beet curly top Iran virus, Exomis microphylla latent virus, Spinach curly top Arizona virus, Abutilon golden mosaic virus, Abutilon mosaic Bolivia virus, Abutilon mosaic Brazil virus, Abutilon mosaic virus, African cassava mosaic Burkina Faso virus, African cassava mosaic virus, Ageratum enation virus, Ageratum leaf curl Sichuan virus, Ageratum leaf curl virus, Ageratum yellow vein Hualian virus, Ageratum yellow vein Sri Lanka virus, Ageratum yellow vein virus, Allamanda leaf curl virus, Allamanda leaf mottle distortion virus, Alternanthera yellow vein virus, Andrographis yellow vein leaf curl virus, Asystasia mosaic Madagascar virus, Bean calico mosaic virus, Bean chlorosis virus, Bean dwarf mosaic virus, Bean golden mosaic virus, Bean golden yellow mosaic virus, Bean leaf crumple virus, Bean white chlorosis mosaic virus, Bean yellow mosaic Mexico virus, Bhendi yellow vein Bhubhaneswar virus, Bhendi yellow vein Haryana virus, Bhendi yellow vein mosaic Delhi virus, Bhendi yellow vein mosaic virus, Bitter gourd yellow mosaic virus, Blainvillea yellow spot virus, Blechum interveinal chlorosis virus, Blechum yellow vein virus, Boerhavia yellow spot virus, Cabbage leaf curl Jamaica virus, Cabbage leaf curl virus, Capraria yellow spot virus, Cassava mosaic Madagascar virus, Catharanthus yellow mosaic virus, Centrosema yellow spot virus, Chayote yellow mosaic virus, Chenopodium leaf curl virus, Chilli leaf curl Ahmedabad virus, Chilli leaf curl Bhavanisagar virus, Chilli leaf curl Gonda virus, Chilli leaf curl India virus, Chilli leaf curl Kanpur virus, Chilli leaf curl Sri Lanka virus, Chilli leaf curl Vellanad virus, Chilli leaf curl virus, Chino del tomate Amazonas virus, Chino del tomate virus, Cleome golden mosaic virus, Cleome leaf crumple virus, Clerodendron golden mosaic virus, Clerodendron yellow mosaic virus, Clerodendrum golden mosaic China virus, Clerodendrum golden mosaic Jiangsu virus, Cnidoscolus mosaic leaf deformation virus, Coccinia mosaic Tamil Nadu virus, Common bean mottle virus, Common bean severe mosaic virus, Corchorus golden mosaic virus, Corchorus yellow spot virus, Corchorus yellow vein mosaic virus, Corchorus yellow vein virus, Cotton chlorotic spot virus, Cotton leaf crumple virus, Cotton leaf curl Alabad virus, Cotton leaf curl Bangalore virus, Cotton leaf curl Barasat virus, Cotton leaf curl Gezira virus, Cotton leaf curl Kokhran virus, Cotton leaf curl Multan virus, Cotton yellow mosaic virus, Cowpea bright yellow mosaic virus, Cowpea golden mosaic virus, Crassocephalum yellow vein virus, Croton golden mosaic virus, Croton yellow vein mosaic virus, Cucurbit leaf crumple virus, Dalechampia chlorotic mosaic virus, Datura leaf curl virus, Datura leaf distortion virus, Deinbollia mosaic virus, Desmodium leaf distortion virus, Desmodium mottle virus, Dicliptera yellow mottle Cuba virus, Dicliptera yellow mottle virus, Dolichos yellow mosaic virus, Duranta leaf curl virus, East African cassava mosaic Cameroon virus, East African cassava mosaic Kenya virus, East African cassava mosaic Malawi virus, East African cassava mosaic virus, East African cassava mosaic Zanzibar virus, Eclipta yellow vein virus, Emilia yellow vein Fujian virus, Emilia yellow vein Thailand virus, Emilia yellow vein virus, Erectites yellow mosaic virus, Eupatorium yellow vein mosaic virus, Eupatorium yellow vein virus, Euphorbia leaf curl Guangxi virus, Euphorbia leaf curl virus, Euphorbia mosaic Peru virus, Euphorbia mosaic virus, Euphorbia yellow leaf curl virus, Euphorbia yellow mosaic virus, French bean leaf curl virus, Hedyotis uncinella yellow mosaic virus, Hemidesmus yellow mosaic virus, Hibiscus golden mosaic virus, Hollyhock leaf curl virus, Hollyhock yellow vein mosaic virus, Hollyhock yellow vein virus, Honeysuckle yellow vein virus, Horsegram yellow mosaic virus, Indian cassava mosaic virus, Jacquemontia mosaic Yucatan virus, Jacquemontia yellow mosaic virus, Jacquemontia yellow vein virus, Jatropha leaf curl Gujarat virus, Jatropha leaf curl virus, Jatropha leaf yellow mosaic virus, Jatropha mosaic India virus, Jatropha mosaic Nigeria virus, Jatropha mosaic virus, Jatropha yellow mosaic virus, Kudzu mosaic virus, Leonurus mosaic virus, Lindernia anagallis yellow vein virus, Lisianthus enation leaf curl virus, Ludwigia yellow vein Vietnam virus, Ludwigia yellow vein virus, Luffa yellow mosaic virus, Lycianthes yellow mosaic virus, Macroptilium bright mosaic virus, Macroptilium common mosaic virus, Macroptilium golden mosaic virus, Macroptilium mosaic Puerto Rico virus, Macroptilium yellow mosaic Florida virus, Macroptilium yellow mosaic virus, Macroptilium yellow spot virus, Macroptilium yellow vein virus, Malvastrum bright yellow mosaic virus, Malvastrum leaf curl Philippines virus, Malvastrum leaf curl virus, Malvastrum yellow mosaic Helshire virus, Malvastrum yellow mosaic Jamaica virus, Malvastrum yellow mosaic virus, Malvastrum yellow vein Cambodia virus, Malvastrum yellow vein Honghe virus, Malvastrum yellow vein Lahore virus, Malvastrum yellow vein virus, Malvastrum yellow vein Yunnan virus, Melochia mosaic virus, Melochia yellow mosaic virus, Melon chlorotic leaf curl virus, Melon chlorotic mosaic virus, Melon yellow mosaic virus, Merremia mosaic Puerto Rico virus, Merremia mosaic virus, Mesta yellow vein mosaic Bahraich virus, Mimosa yellow leaf curl virus, Mirabilis leaf curl virus, Mungbean yellow mosaic India virus, Mungbean yellow mosaic virus, Okra enation leaf curl virus, Okra leaf curl Oman virus, Okra mottle virus, Okra yellow crinkle virus, Okra yellow mosaic Mexico virus, Oxalis yellow vein virus, Papaya leaf crumple virus, Papaya leaf curl China virus, Papaya leaf curl Guandong virus, Papaya leaf curl virus, Passionfruit leaf curl virus, Passionfruit leaf distortion virus, Passionfruit severe leaf distortion virus, Pavonia mosaic virus, Pavonia yellow mosaic virus, Pea leaf distortion virus, Pedilanthus leaf curl virus, Pepper golden mosaic virus, Pepper huasteco yellow vein virus, Pepper leaf curl Bangladesh virus, Pepper leaf curl Lahore virus, Pepper leaf curl virus, Pepper leaf curl Yunnan virus, Pepper leafroll virus, Pepper yellow leaf curl Aceh virus, Pepper yellow leaf curl Indonesia virus, Pepper yellow leaf curl Indonesia virus 2, Pepper yellow leaf curl Thailand virus, Pepper yellow leaf curl virus, Pepper yellow vein Mali virus, Potato yellow mosaic panama virus, Potato yellow mosaic virus, Pouzolzia golden mosaic virus, Pouzolzia mosaic Guangdong virus, Pouzolzia yellow mosaic virus, Premna leaf curl virus, Pumpkin yellow mosaic virus, Radish leaf curl virus, Ramie mosaic Yunnan virus, Rhynchosia golden mosaic Havana virus, Rhynchosia golden mosaic Sinaloa virus, Rhynchosia golden mosaic virus, Rhynchosia mild mosaic virus, Rhynchosia rugose golden mosaic virus, Rhynchosia yellow mosaic India virus, Rhynchosia yellow mosaic virus, Rose leaf curl virus, Sauropus leaf curl virus, Senecio yellow mosaic virus, Senna leaf curl virus, Sida angular mosaic virus, Sida bright yellow mosaic virus, Sida chlorotic mottle virus, Sida chlorotic vein virus, Sida ciliaris golden mosaic virus, Sida common mosaic virus, Sida golden mosaic Braco virus, Sida golden mosaic Brazil virus, Sida golden mosaic Buckup virus, Sida golden mosaic Costa Rica virus, Sida golden mosaic Florida virus, Sida golden mosaic Lara virus, Sida golden mosaic virus, Sida golden mottle virus, Sida golden yellow spot virus, Sida golden yellow vein virus, Sida leaf curl virus, Sida micrantha mosaic virus, Sida mosaic Alagoas virus, Sida mosaic Bolivia virus 1, Sida mosaic Bolivia virus 2, Sida mosaic Sinaloa virus, Sida mottle Alagoas virus, Sida mottle virus, Sida yellow blotch virus, Sida yellow leaf curl virus, Sida yellow mosaic Alagoas virus, Sida yellow mosaic China virus, Sida yellow mosaic virus, Sida yellow mosaic Yucatan virus, Sida yellow mottle virus, Sida yellow net virus, Sida yellow vein Vietnam virus, Sida yellow vein virus, Sidastrum golden leaf spot virus, Siegesbeckia yellow vein Guangxi virus, Siegesbeckia yellow vein virus, Solanum mosaic Bolivia virus, South African cassava mosaic virus, Soybean blistering mosaic virus, Soybean chlorotic blotch virus, Soybean mild mottle virus, Spilanthes yellow vein virus, Spinach yellow vein virus, Squash leaf curl China virus, Squash leaf curl Philippines virus, Squash leaf curl virus, Squash leaf curl Yunnan virus, Squash mild leaf curl virus, Sri Lankan cassava mosaic virus, Stachytarpheta leaf curl virus, Sunn hemp leaf distortion virus, Sweet potato golden vein Korea virus, Sweet potato leaf curl Canary virus, Sweet potato leaf curl China virus, Sweet potato leaf curl Georgia virus, Sweet potato leaf curl Guangxi virus, Sweet potato leaf curl Henan virus, Sweet potato leaf curl Hubei virus, Sweet potato leaf curl Sao Paulo virus, Sweet potato leaf curl Shandong virus, Sweet potato leaf curl Sichuan virus 1, Sweet potato leaf curl Sichuan virus 2, Sweet potato leaf curl South Carolina virus, Sweet potato leaf curl virus, Sweet potato mosaic virus, Synedrella yellow vein clearing virus, Telfairia golden mosaic virus, Tobacco curly shoot virus, Tobacco leaf curl Comoros virus, Tobacco leaf curl Cuba virus, Tobacco leaf curl Dominican Republic virus, Tobacco leaf curl Pusa virus, Tobacco leaf curl Thailand virus, Tobacco leaf curl Yunnan virus, Tobacco leaf curl Zimbabwe virus, Tobacco leaf rugose virus, Tobacco mottle leaf curl virus, Tobacco yellow crinkle virus, Tomato bright yellow mosaic virus, Tomato bright yellow mottle virus, Tomato chino La Paz virus, Tomato chlorotic leaf curl virus, Tomato chlorotic leaf distortion virus, Tomato chlorotic mottle Guyane virus, Tomato chlorotic mottle virus, Tomato common mosaic virus, Tomato curly stunt virus, Tomato dwarf leaf virus, Tomato enation leaf curl virus, Tomato golden leaf distortion virus, Tomato golden leaf spot virus, Tomato golden mosaic virus, Tomato golden mottle virus, Tomato golden vein virus, Tomato interveinal chlorosis virus, Tomato latent virus, Tomato leaf curl Anjouan virus, Tomato leaf curl Arusha virus, Tomato leaf curl Bangalore virus, Tomato leaf curl Bangladesh virus, Tomato leaf curl Burkina Faso virus, Tomato leaf curl Cebu virus, Tomato leaf curl China virus, Tomato leaf curl Comoros virus, Tomato leaf curl Diana virus, Tomato leaf curl Ghana virus, Tomato leaf curl Guangdong virus, Tomato leaf curl Guangxi virus, Tomato leaf curl Gujarat virus, Tomato leaf curl Hainan virus, Tomato leaf curl Hanoi virus, Tomato leaf curl Hsinchu virus, Tomato leaf curl Iran virus, Tomato leaf curl Japan virus, Tomato leaf curl Java virus, Tomato leaf curl Joydebpur virus, Tomato leaf curl Karnataka virus, Tomato leaf curl Karnataka virus 2, Tomato leaf curl Karnataka virus 3, Tomato leaf curl Kerala virus, Tomato leaf curl Laos virus, Tomato leaf curl Liwa virus, Tomato leaf curl Madagascar virus, Tomato leaf curl Mahe virus, Tomato leaf curl Malaysia virus, Tomato leaf curl Mali virus, Tomato leaf curl Mindanao virus, Tomato leaf curl Moheli virus, Tomato leaf curl Namakely virus, Tomato leaf curl New Delhi virus, Tomato leaf curl New Delhi virus 2, Tomato leaf curl New Delhi virus 4, Tomato leaf curl New Delhi virus 5, Tomato leaf curl Nigeria virus, Tomato leaf curl Palampur virus, Tomato leaf curl Patna virus, Tomato leaf curl Philippines virus, Tomato leaf curl Pune virus, Tomato leaf curl purple vein virus, Tomato leaf curl Rajasthan virus, Tomato leaf curl Seychelles virus, Tomato leaf curl Sinaloa virus, Tomato leaf curl Sri Lanka virus, Tomato leaf curl Sudan virus, Tomato leaf curl Sulawesi virus, Tomato leaf curl Taiwan virus, Tomato leaf curl Tanzania virus, Tomato leaf curl Toliara virus, Tomato leaf curl Uganda virus, Tomato leaf curl Vietnam virus, Tomato leaf curl virus, Tomato leaf deformation virus, Tomato leaf distortion virus, Tomato mild mosaic virus, Tomato mild yellow leaf curl Aragua virus, Tomato mosaic Havana virus, Tomato mottle leaf curl virus, Tomato mottle Taino virus, Tomato mottle virus, Tomato mottle wrinkle virus, Tomato rugose mosaic virus, Tomato rugose yellow leaf curl virus, Tomato severe leaf curl Kalakada virus, Tomato severe leaf curl virus, Tomato severe rugose virus, Tomato twisted leaf virus, Tomato wrinkled mosaic virus, Tomato yellow leaf curl Axarquia virus, Tomato yellow leaf curl China virus, Tomato yellow leaf curl Guangdong virus, Tomato yellow leaf curl Indonesia virus, Tomato yellow leaf curl Kanchanaburi virus, Tomato yellow leaf curl Malaga virus, Tomato yellow leaf curl Mali virus, Tomato yellow leaf curl Sardinia virus, Tomato yellow leaf curl Shuangbai virus, Tomato yellow leaf curl Thailand virus, Tomato yellow leaf curl Vietnam virus, Tomato yellow leaf curl virus, Tomato yellow leaf curl Yunnan virus, Tomato yellow leaf distortion virus, Tomato yellow margin leaf curl virus, Tomato yellow mottle virus, Tomato yellow spot virus, Tomato yellow vein streak virus, Triumfetta yellow mosaic virus, Velvet bean golden mosaic virus, Velvet bean severe mosaic virus, Vernonia crinkle virus, Vernonia yellow vein Fujian virus, Vernonia yellow vein virus, Vigna yellow mosaic virus, Vinca leaf curl virus, Watermelon chlorotic stunt virus, West African Asystasia virus 1, West African Asystasia virus 2, West African Asystasia virus 3, Whitefly-associated begomovirus 1, Whitefly-associated begomovirus 2, Whitefly-associated begomovirus 3, Whitefly-associated begomovirus 4, Whitefly-associated begomovirus 6, Whitefly-associated begomovirus 7, Wissadula golden mosaic virus, Wissadula yellow mosaic virus, Alfalfa leaf curl virus, Euphorbia caput-medusae latent virus, French bean severe leaf curl virus, Plantago lanceolata latent virus, Beet curly top virus, Horseradish curly top virus, Spinach severe curly top virus, Eragrostis curvula streak virus, Grapevine red blotch virus, Prunus latent virus, Wild Vitis latent virus, Axonopus compressus streak virus, Bromus catharticus striate mosaic virus, Chickpea chlorosis Australia virus, Chickpea chlorosis virus, Chickpea chlorotic dwarf virus, Chickpea redleaf virus, Chickpea yellow dwarf virus, Chickpea yellows virus, Chloris striate mosaic virus, Digitaria ciliaris striate mosaic virus, Digitaria didactyla striate mosaic virus, Digitaria streak virus, Dragonfly-associated mastrevirus, Eragrostis minor streak virus, Eragrostis streak virus, Maize streak dwarfing virus, Maize streak Reunion virus, Maize streak virus, Maize striate mosaic virus, Miscanthus streak virus, Oat dwarf virus, Panicum streak virus, Paspalum dilatatum striate mosaic virus, Paspalum striate mosaic virus, Rice latent virus 1, Rice latent virus 2, Saccharum streak virus, Sporobolus striate mosaic virus 1, Sporobolus striate mosaic virus 2, Sugarcane chlorotic streak virus, Sugarcane streak Egypt virus, Sugarcane streak Reunion virus, Sugarcane streak virus, Sugarcane striate virus, Sugarcane white streak virus, Sweet potato symptomless virus 1, Switchgrass mosaic-associated virus, Tobacco yellow dwarf virus, Urochloa streak virus, Wheat dwarf India virus, Wheat dwarf virus, Tomato pseudo-curly top virus, Sesame curly top virus, Turnip curly top virus, Turnip leaf roll virus, Citrus chlorotic dwarf associated virus, Mulberry mosaic dwarf associated virus, Blackbird associated gemycircularvirus 1, Bovine associated gemycircularvirus 1, Bromus associated gemycircularvirus 1, Cassava associated gemycircularvirus 1, Chickadee associated gemycircularvirus 1, Chicken associated gemycircularvirus 1, Chicken associated gemycircularvirus 2, Dragonfly associated gemycircularvirus 1, Equine associated gemycircularvirus 1, Fur seal associated gemycircularvirus 1, Gerygone associated gemycircularvirus 1, Gerygone associated gemycircularvirus 2, Gerygone associated gemycircularvirus 3, Hypericum associated gemycircularvirus 1, Lama associated gemycircularvirus 1, Mallard associated gemycircularvirus 1, Miniopterus associated gemycircularvirus 1, Mongoose associated gemycircularvirus 1, Mosquito associated gemycircularvirus 1, Odonata associated gemycircularvirus 1, Odonata associated gemycircularvirus 2, Poaceae associated gemycircularvirus 1, Porcine associated gemycircularvirus 1, Porcine associated gemycircularvirus 2, Pteropus associated gemycircularvirus 1, Pteropus associated gemycircularvirus 2, Pteropus associated gemycircularvirus 3, Pteropus associated gemycircularvirus 4, Pteropus associated gemycircularvirus 5, Pteropus associated gemycircularvirus 6, Pteropus associated gemycircularvirus 7, Pteropus associated gemycircularvirus 8, Pteropus associated gemycircularvirus 9, Pteropus associated gemycircularvirus 10, Rat associated gemycircularvirus 1, Sclerotinia gemycircularvirus 1, Sewage derived gemycircularvirus 1, Sewage derived gemycircularvirus 2, Sewage derived gemycircularvirus 3, Sewage derived gemycircularvirus 4, Sewage derived gemycircularvirus 5, Sheep associated gemycircularvirus 1, Soybean associated gemycircularvirus 1, Dragonfly associated gemyduguivirus 1, Canine associated gemygorvirus 1, Mallard associated gemygorvirus 1, Pteropus associated gemygorvirus 1, Sewage derived gemygorvirus 1, Starling associated gemygorvirus 1, Badger associated gemykibivirus 1, Black robin associated gemykibivirus 1, Blackbird associated gemykibivirus 1, Bovine associated gemykibivirus 1, Dragonfly associated gemykibivirus 1, Human associated gemykibivirus 1, Human associated gemykibivirus 2, Human associated gemykibivirus 3, Human associated gemykibivirus 4, Human associated gemykibivirus 5, Mongoose associated gemykibivirus 1, Pteropus associated gemykibivirus 1, Rhinolophus associated gemykibivirus 1, Rhinolophus associated gemykibivirus 2, Sewage derived gemykibivirus 1, Sewage derived gemykibivirus 2, Pteropus associated gemykolovirus 1, Pteropus associated gemykolovirus 2, Bovine associated gemykrogvirus 1, Caribou associated gemykrogvirus 1, Sewage derived gemykrogvirus 1, Rabbit associated gemykroznavirus 1, Ostrich associated gemytondvirus 1, Human associated gemyvongvirus 1, Alphapleolipovirus HHPV1, Alphapleolipovirus HHPV2, Alphapleolipovirus HRPV1, Alphapleolipovirus HRPV2, Alphapleolipovirus HRPV6, Betapleolipovirus HGPV1, Betapleolipovirus HHPV3, Betapleolipovirus HHPV4, Betapleolipovirus HRPV3, Betapleolipovirus HRPV9, Betapleolipovirus HRPV10, Betapleolipovirus HRPV11, Betapleolipovirus HRPV12, Betapleolipovirus SNJ2, Gammapleolipovirus His2, Amasya cherry disease associated chrysovirus, Anthurium mosaic-associated chrysovirus, Aspergillus fumigatus chrysovirus, Brassica campestris chrysovirus, Colletotrichum gloeosporioides chrysovirus, Cryphonectria nitschkei chrysovirus 1, Fusarium oxysporum chrysovirus 1, Helminthosporium victoriae virus 145S, Isaria javanica chrysovirus, Macrophomina phaseolina chrysovirus, Penicillium brevicompactum virus, Penicillium chrysogenum virus, Penicillium cyaneofulvum virus, Persea americana chrysovirus, Raphanus sativus chrysovirus, Shuangao insect-associated chrysovirus, Verticillium dahliae chrysovirus 1, Alternaria alternata chrysovirus, Botryosphaeria dothidea chrysovirus, Colletotrichum fructicola chrysovirus 1, Fusarium graminearum chrysovirus, Fusarium oxysporum chrysovirus 2, Magnaporthe oryzae chrysovirus, Penicillium janczewskii chrysovirus 1, Penicillium janczewskii chrysovirus 2, Rosellinia necatrix megabirnavirus 1, Rosellinia necatrix quadrivirus 1, Giardia lamblia virus, Leishmania RNA virus 1, Leishmania RNA virus 2, Saccharomyces cerevisiae virus L-A, Saccharomyces cerevisiae virus LBCLa, Scheffersomyces segobiensis virus L, Tuber aestivum virus 1, Ustilago maydis virus H1, Xanthophyllomyces dendrorhous virus L1A, Xanthophyllomyces dendrorhous virus L1B, Trichomonas vaginalis virus 1, Trichomonas vaginalis virus 2, Trichomonas vaginalis virus 3, Trichomonas vaginalis virus 4, Aspergillus foetidus slow virus 1, Beauveria bassiana victorivirus 1, Chalara elegans RNA Virus 1, Coniothyrium minitans RNA virus, Epichloe festucae virus 1, Gremmeniella abietina RNA virus L1, Helicobasidium mompa totivirus 1-17, Helminthosporium victoriae virus 190S, Magnaporthe oryzae virus 1, Magnaporthe oryzae virus 2, Rosellinia necatrix victorivirus 1, Sphaeropsis sapinea RNA virus 1, Sphaeropsis sapinea RNA virus 2, Tolypocladium cylindrosporum virus 1, Eriocheir sinensis reovirus, Micromonas pusilla reovirus, African horse sickness virus, Bluetongue virus, Changuinola virus, Chenuda virus, Chobar Gorge virus, Corriparta virus, Epizootic hemorrhagic disease virus, Equine encephalosis virus, Eubenangee virus, Great Island virus, Ieri virus, Lebombo virus, Orungo virus, Palyam virus, Peruvian horse sickness virus, St Croix River virus, Umatilla virus, Wad Medani virus, Wallal virus, Warrego virus, Wongorr virus, Yunnan orbivirus, Rice dwarf virus, Rice gall dwarf virus, Wound tumor virus, Rotavirus A, Rotavirus B, Rotavirus C, Rotavirus D, Rotavirus F, Rotavirus G, Rotavirus H, Rotavirus I, Rotavirus J, Banna virus, Kadipiro virus, Liao ning virus, Aquareovirus A, Aquareovirus B, Aquareovirus C, Aquareovirus D, Aquareovirus E, Aquareovirus F, Aquareovirus G, Colorado tick fever coltivirus, Eyach coltivirus, Kundal coltivirus, Tai Forest coltivirus, Tarumizu coltivirus, Sapovirus 1, Cypovirus 2, Cypovirus 3, Cypovirus 4, Cypovirus 5, Cypovirus 6, Cypovirus 7, Cypovirus 8, Cypovirus 9, Cypovirus 10, Cypovirus 11, Cypovirus 12, Cypovirus 13, Cypovirus 14, Cypovirus 15, Cypovirus 16, Aedes pseudoscutellaris reovirus, Fiji disease virus, Garlic dwarf virus, Maize rough dwarf virus, Mal de Rio Cuarto virus, Nilaparvata lugens reovirus, Oat sterile dwarf virus, Pangola stunt virus, Rice black streaked dwarf virus, Southern rice black-streaked dwarf virus, Idnoreovirus 1, Idnoreovirus 2, Idnoreovirus 3, Idnoreovirus 4, Idnoreovirus 5, Mycoreovirus 1, Mycoreovirus 2, Mycoreovirus 3, Avian orthoreovirus, Baboon orthoreovirus, Broome orthoreovirus, Mahlapitsi orthoreovirus, Mammalian orthoreovirus, Nelson Bay orthoreovirus, Neoavian orthoreovirus, Piscine orthoreovirus, Reptilian orthoreovirus, Testudine orthoreovirus, Echinochloa ragged stunt virus, Rice ragged stunt virus, Pseudomonas virus phi6, Pseudomonas virus phi8, Pseudomonas virus phi12, Pseudomonas virus phi13, Pseudomonas virus phi2954, Pseudomonas virus phiNN, Pseudomonas virus phiYY, Antheraea eucalypti virus, Darna trima virus, Dasychira pudibunda virus, Nudaurelia capensis beta virus, Philosamia cynthia x ricini virus, Pseudoplusia includens virus, Trichoplusia ni virus, Dendrolimus punctatus virus, Helicoverpa armigera stunt virus, Nudaurelia capensis omega virus, Beet necrotic yellow vein virus, Beet soil-borne mosaic virus, Burdock mottle virus, Rice stripe necrosis virus, Orthohepevirus A, Orthohepevirus B, Orthohepevirus C, Orthohepevirus D, Piscihepevirus A, Rubella virus, Alfalfa mosaic virus, Amazon lily mild mottle virus, Pelargonium zonate spot virus, Broad bean mottle virus, Brome mosaic virus, Cassia yellow blotch virus, Cowpea chlorotic mottle virus, Melandrium yellow fleck virus, Spring beauty latent virus, Cucumber mosaic virus, Gayfeather mild mottle virus, Peanut stunt virus, Tomato aspermy virus, Ageratum latent virus, American plum line pattern virus, Apple mosaic virus, Asparagus virus 2, Blackberry chlorotic ringspot virus, Blueberry shock virus, Citrus leaf rugose virus, Citrus variegation virus, Elm mottle virus, Fragaria chiloensis latent virus, Humulus japonicus latent virus, Lilac leaf chlorosis virus, Lilac ring mottle virus, Parietaria mottle virus, Privet ringspot virus, Prune dwarf virus, Prunus necrotic ringspot virus, Spinach latent virus, Strawberry necrotic shock virus, Tobacco streak virus, Tomato necrotic streak virus, Tulare apple mosaic virus, Olive latent virus 2, Air potato ampelovirus 1, Blackberry vein banding-associated virus, Grapevine leafroll-associated virus 1, Grapevine leafroll-associated virus 3, Grapevine leafroll-associated virus 4, Grapevine leafroll-associated virus 13, Little cherry virus 2, Pineapple mealybug wilt-associated virus 1, Pineapple mealybug wilt-associated virus 2, Pineapple mealybug wilt-associated virus 3, Pistachio ampelovirus A, Plum bark necrosis stem pitting-associated virus, Arracacha virus 1, Beet yellow stunt virus, Beet yellows virus, Blackcurrant closterovirus 1, Burdock yellows virus, Carnation necrotic fleck virus, Carrot yellow leaf virus, Citrus tristeza virus, Grapevine leafroll-associated virus 2, Mint virus 1, Raspberry leaf mottle virus, Rehmannia virus 1, Rose leaf rosette-associated virus, Strawberry chlorotic fleck-associated virus, Tobacco virus 1, Wheat yellow leaf virus, Abutilon yellows virus, Bean yellow disorder virus, Beet pseudoyellows virus, Blackberry yellow vein-associated virus, Cucurbit yellow stunting disorder virus, Diodia vein chlorosis virus, Lettuce chlorosis virus, Lettuce infectious yellows virus, Potato yellow vein virus, Strawberry pallidosis-associated virus, Sweet potato chlorotic stunt virus, Tetterwort vein chlorosis virus, Tomato chlorosis virus, Tomato infectious chlorosis virus, Areca palm velarivirus 1, Cordyline virus 1, Cordyline virus 2, Cordyline virus 3, Cordyline virus 4, Grapevine leafroll-associated virus 7, Little cherry virus 1, Actinidia virus 1, Alligatorweed stunting virus, Blueberry virus A, Megakepasma mosaic virus, Mint vein banding-associated virus, Olive leaf yellowing-associated virus, Persimmon virus B, Agaricus bisporus alphaendornavirus 1, Basella alba alphaendornavirus 1, Bell pepper alphaendornavirus, Cluster bean alphaendornavirus 1, Cucumis melo alphaendornavirus, Erysiphe cichoracearum alphaendornavirus, Grapevine endophyte alphaendornavirus, Helianthus annuus alphaendornavirus, Helicobasidium mompa alphaendornavirus 1, Hordeum vulgare alphaendornavirus, Hot pepper alphaendornavirus, Lagenaria siceraria alphaendornavirus, Oryza rufipogon alphaendornavirus, Oryza sativa alphaendornavirus, Persea americana alphaendornavirus 1, Phaseolus vulgaris alphaendornavirus 1, Phaseolus vulgaris alphaendornavirus 2, Phaseolus vulgaris alphaendornavirus 3, Phytophthora alphaendornavirus 1, Rhizoctonia cerealis alphaendornavirus 1, Rhizoctonia solani alphaendornavirus 2, Vicia faba alphaendornavirus, Winged bean alphaendornavirus 1, Yerba mate alphaendornavirus, Alternaria brassicicola betaendornavirus 1, Botrytis cinerea betaendornavirus 1, Gremmeniella abietina betaendornavirus 1, Rosellinia necatrix betaendornavirus 1, Sclerotinia minor betaendornavirus 1, Sclerotinia sclerotiorum betaendornavirus 1, Tuber aestivum betaendornavirus, Blueberry necrotic ring blotch virus, Tea plant necrotic ring blotch virus, Citrus leprosis virus C, Citrus leprosis virus C2, Hibiscus green spot virus 2, Privet idaeovirus, Raspberry bushy dwarf virus, Japanese holly fern mottle pteridovirus, Maize associated pteridovirus, Aura virus, Barmah Forest virus, Bebaru virus, Cabassou virus, Chikungunya virus, Eastern equine encephalitis virus, Eilat virus, Everglades virus, Fort Morgan virus, Getah virus, Highlands J virus, Madariaga virus, Mayaro virus, Middelburg virus, Mosso das Pedras virus, Mucambo virus, Ndumu virus, Onyong-nyong virus, Pixuna virus, Rio Negro virus, Ross River virus, Salmon pancreas disease virus, Semliki Forest virus, Sindbis virus, Southern elephant seal virus, Tonate virus, Trocara virus, Una virus, Venezuelan equine encephalitis virus, Western equine encephalitis virus, Whataroa virus, Chinese wheat mosaic virus, Japanese soil-borne wheat mosaic virus, Oat golden stripe virus, Soil-borne cereal mosaic virus, Soil-borne wheat mosaic virus, Sorghum chlorotic spot virus, Drakaea virus A, Gentian ovary ringspot virus, Anthoxanthum latent blanching virus, Barley stripe mosaic virus, Lychnis ringspot virus, Poa semilatent virus, Indian peanut clump virus, Peanut clump virus, Beet soil-borne virus, Beet virus Q, Broad bean necrosis virus, Colombian potato soil-borne virus, Potato mop-top virus, Bell pepper mottle virus, Brugmansia mild mottle virus, Cactus mild mottle virus, Clitoria yellow mottle virus, Cucumber fruit mottle mosaic virus, Cucumber green mottle mosaic virus, Cucumber mottle virus, Frangipani mosaic virus, Hibiscus latent Fort Pierce virus, Hibiscus latent Singapore virus, Kyuri green mottle mosaic virus, Maracuja mosaic virus, Obuda pepper virus, Odontoglossum ringspot virus, Opuntia chlorotic ringspot virus, Paprika mild mottle virus, Passion fruit mosaic virus, Pepper mild mottle virus, Plumeria mosaic virus, Rattail cactus necrosis-associated virus, Rehmannia mosaic virus, Ribgrass mosaic virus, Streptocarpus flower break virus, Sunn-hemp mosaic virus, Tobacco latent virus, Tobacco mild green mosaic virus, Tobacco mosaic virus, Tomato brown rugose fruit virus, Tomato mosaic virus, Tomato mottle mosaic virus, Tropical soda apple mosaic virus, Turnip vein-clearing virus, Ullucus mild mottle virus, Wasabi mottle virus, Yellow tailflower mild mottle virus, Youcai mosaic virus, Zucchini green mottle mosaic virus, Pea early-browning virus, Pepper ringspot virus, Tobacco rattle virus, Alfalfa virus S, Arachis pintoi virus, Blackberry virus E, Garlic mite-borne filamentous virus, Garlic virus A, Garlic virus B, Garlic virus C, Garlic virus D, Garlic virus E, Garlic virus X, Shallot virus X, Vanilla latent virus, Botrytis virus X, Lolium latent virus, Citrus yellow vein clearing virus, Indian citrus ringspot virus, Donkey orchid symptomless virus, Actinidia virus X, Allium virus X, Alstroemeria virus X, Alternanthera mosaic virus, Asparagus virus 3, Bamboo mosaic virus, Cactus virus X, Cassava common mosaic virus, Cassava virus X, Clover yellow mosaic virus, Cymbidium mosaic virus, Foxtail mosaic virus, Hosta virus X, Hydrangea ringspot virus, Lagenaria mild mosaic virus, Lettuce virus X, Lily virus X, Malva mosaic virus, Mint virus X, Narcissus mosaic virus, Nerine virus X, Opuntia virus X, Papaya mosaic virus, Pepino mosaic virus, Phaius virus X, Pitaya virus X, Plantago asiatica mosaic virus, Plantain virus X, Potato aucuba mosaic virus, Potato virus X, Schlumbergera virus X, Strawberry mild yellow edge virus, Tamus red mosaic virus, Tulip virus X, Vanilla virus X, White clover mosaic virus, Yam virus X, Zygocactus virus X, Sclerotinia sclerotiorum debilitation-associated RNA virus, Aconitum latent virus, American hop latent virus, Atractylodes mottle virus, Blueberry scorch virus, Butterbur mosaic virus, Cactus virus 2, Caper latent virus, Carnation latent virus, Chrysanthemum virus B, Cole latent virus, Coleus vein necrosis virus, Cowpea mild mottle virus, Cucumber vein-clearing virus, Daphne virus S, Gaillardia latent virus, Garlic common latent virus, Helenium virus S, Helleborus mosaic virus, Helleborus net necrosis virus, Hippeastrum latent virus, Hop latent virus, Hop mosaic virus, Hydrangea chlorotic mottle virus, Kalanchoe latent virus, Ligustrum necrotic ringspot virus, Ligustrum virus A, Lily symptomless virus, Melon yellowing-associated virus, Mirabilis jalapa mottle virus, Narcissus common latent virus, Nerine latent virus, Passiflora latent virus, Pea streak virus, Phlox virus B, Phlox virus M, Phlox virus S, Poplar mosaic virus, Potato latent virus, Potato virus H, Potato virus M, Potato virus P, Potato virus S, Red clover vein mosaic virus, Sambucus virus C, Sambucus virus D, Sambucus virus E, Shallot latent virus, Sint-Jan onion latent virus, Strawberry pseudo mild yellow edge virus, Sweet potato C6 virus, Sweet potato chlorotic fleck virus, Verbena latent virus, Yam latent virus, Apple stem pitting virus, Apricot latent virus, Asian prunus virus 1, Asian prunus virus 2, Grapevine rupestris stem pitting-associated virus, Grapevine virus T, Peach chlorotic mottle virus, Rubus canadensis virus 1, African oil palm ringspot virus, Cherry green ring mottle virus, Cherry necrotic rusty mottle virus, Cherry rusty mottle associated virus, Cherry twisted leaf associated virus, Banana mild mosaic virus, Banana virus X, Sugarcane striate mosaic-associated virus, Apple stem grooving virus, Cherry virus A, Currant virus A, Mume virus A, Carrot Ch virus 1, Carrot Ch virus 2, Citrus leaf blotch virus, Diuris virus A, Diuris virus B, Hardenbergia virus A, Actinidia seed borne latent virus, Apricot vein clearing associated virus, Caucasus prunus virus, Ribes americanum virus A, Potato virus T, Prunus virus T, Apple chlorotic leaf spot virus, Apricot pseudo-chlorotic leaf spot virus, Cherry mottle leaf virus, Grapevine berry inner necrosis virus, Grapevine Pinot gris virus, Peach mosaic virus, Phlomis mottle virus, Actinidia virus A, Actinidia virus B, Arracacha virus V, Blackberry virus A, Grapevine virus A, Grapevine virus B, Grapevine virus D, Grapevine virus E, Grapevine virus F, Grapevine virus G, Grapevine virus H, Grapevine virus I, Grapevine virus J, Heracleum latent virus, Mint virus 2, Watermelon virus A, Fusarium deltaflexivirus 1, Sclerotinia deltaflexivirus 1, Soybean-associated deltaflexivirus 1, Botrytis virus F, Grapevine fleck virus, Bermuda grass etched-line virus, Blackberry virus S, Citrus sudden death-associated virus, Grapevine asteroid mosaic associated virus, Grapevine Syrah virus 1, Maize rayado fino virus, Nectarine marafivirus M, Oat blue dwarf virus, Olive latent virus 3, Peach marafivirus D, Anagyris vein yellowing virus, Andean potato latent virus, Andean potato mild mosaic virus, Belladonna mottle virus, Cacao yellow mosaic virus, Calopogonium yellow vein virus, Chayote mosaic virus, Chiltepin yellow mosaic virus, Clitoria yellow vein virus, Desmodium yellow mottle virus, Dulcamara mottle virus, Eggplant mosaic virus, Erysimum latent virus, Kennedya yellow mosaic virus, Melon rugose mosaic virus, Nemesia ring necrosis virus, Okra mosaic virus, Ononis yellow mosaic virus, Passion fruit yellow mosaic virus, Peanut yellow mosaic virus, Petunia vein banding virus, Physalis mottle virus, Plantago mottle virus, Scrophularia mottle virus, Tomato blistering mosaic tymovirus, Turnip yellow mosaic virus, Voandzeia necrotic mosaic virus, Wild cucumber mosaic virus, Bombyx mori latent virus, Poinsettia mosaic virus, Apoi virus, Aroa virus, Bagaza virus, Banzi virus, Bouboui virus, Bukalasa bat virus, Cacipacore virus, Carey Island virus, Cowbone Ridge virus, Dakar bat virus, Dengue virus, Edge Hill virus, Entebbe bat virus, Gadgets Gully virus, Ilheus virus, Israel turkey meningoencephalomyelitis virus, Japanese encephalitis virus, Jugra virus, Jutiapa virus, Kadam virus, Kedougou virus, Kokobera virus, Koutango virus, Kyasanur Forest disease virus, Langat virus, Louping ill virus, Meaban virus, Modoc virus, Montana myotis leukoencephalitis virus, Murray Valley encephalitis virus, Ntaya virus, Omsk hemorrhagic fever virus, Phnom Penh bat virus, Powassan virus, Rio Bravo virus, Royal Farm virus, Saboya virus, Saint Louis encephalitis virus, Sal Vieja virus, San Perlita virus, Saumarez Reef virus, Sepik virus, Tembusu virus, Tick-borne encephalitis virus, Tyuleniy virus, Uganda S virus, Usutu virus, Wesselsbron virus, West Nile virus, Yaounde virus, Yellow fever virus, Yokose virus, Zika virus, Hepacivirus A, Hepacivirus B, Hepacivirus C, Hepacivirus D, Hepacivirus E, Hepacivirus F, Hepacivirus G, Hepacivirus H, Hepacivirus I, Hepacivirus J, Hepacivirus K, Hepacivirus L, Hepacivirus M, Hepacivirus N, Pegivirus A, Pegivirus B, Pegivirus C, Pegivirus D, Pegivirus E, Pegivirus F, Pegivirus G, Pegivirus H, Pegivirus I, Pegivirus J, Pegivirus K, Pestivirus A, Pestivirus B, Pestivirus C, Pestivirus D, Pestivirus E, Pestivirus F, Pestivirus G, Pestivirus H, Pestivirus I, Pestivirus J, Pestivirus K, Black beetle virus, Boolarra virus, Flock House virus, Nodamura virus, Pariacoto virus, Barfin flounder nervous necrosis virus, Redspotted grouper nervous necrosis virus, Striped jack nervous necrosis virus, Tiger puffer nervous necrosis virus, Lake Sinai virus 1, Lake Sinai virus 2, Providence virus, Alfalfa enamovirus 1, Birdsfoot trefoil enamovirus 1, Citrus vein enation virus, Grapevine enamovirus 1, Pea enation mosaic virus 1, Apple associated luteovirus, Apple luteovirus 1, Barley yellow dwarf virus kerII, Barley yellow dwarf virus kerIII, Barley yellow dwarf virus MAV, Barley yellow dwarf virus PAS, Barley yellow dwarf virus PAV, Bean leafroll virus, Cherry associated luteovirus, Nectarine stem pitting associated virus, Red clover associated luteovirus, Rose spring dwarf-associated virus, Soybean dwarf virus, Beet chlorosis virus, Beet mild yellowing virus, Beet western yellows virus, Carrot red leaf virus, Cereal yellow dwarf virus RPS, Cereal yellow dwarf virus RPV, Chickpea chlorotic stunt virus, Cotton leafroll dwarf virus, Cucurbit aphid-borne yellows virus, Faba bean polerovirus 1, Maize yellow dwarf virus RMV, Maize yellow mosaic virus, Melon aphid-borne yellows virus, Pepo aphid-borne yellows virus, Pepper vein yellows virus 1, Pepper vein yellows virus 2, Pepper vein yellows virus 3, Pepper vein yellows virus 4, Pepper vein yellows virus 5, Pepper vein yellows virus 6, Potato leafroll virus, Pumpkin polerovirus, Suakwa aphid-borne yellows virus, Sugarcane yellow leaf virus, Tobacco vein distorting virus, Turnip yellows virus, Barley yellow dwarf virus GPV, Barley yellow dwarf virus SGV, Chickpea stunt disease associated virus, Groundnut rosette assistor virus, Indonesian soybean dwarf virus, Sweet potato leaf speckling virus, Tobacco necrotic dwarf virus, Carrot mottle mimic virus, Carrot mottle virus, Ethiopian tobacco bushy top virus, Groundnut rosette virus, Lettuce speckles mottle virus, Opium poppy mosaic virus, Pea enation mosaic virus 2, Tobacco bushy top virus, Tobacco mottle virus, Angelonia flower break virus, Calibrachoa mottle virus, Carnation mottle virus, Honeysuckle ringspot virus, Nootka lupine vein clearing virus, Pelargonium flower break virus, Saguaro cactus virus, Olive latent virus 1, Olive mild mosaic virus, Potato necrosis virus, Tobacco necrosis virus A, Cucumber leaf spot virus, Johnsongrass chlorotic stripe mosaic virus, Maize white line mosaic virus, Pothos latent virus, Yam spherical virus, Oat chlorotic stunt virus, Cardamine chlorotic fleck virus, Hibiscus chlorotic ringspot virus, Japanese iris necrotic ring virus, Turnip crinkle virus, Beet black scorch virus, Leek white stripe virus, Tobacco necrosis virus D, Galinsoga mosaic virus, Cowpea mottle virus, Melon necrotic spot virus, Pea stem necrosis virus, Soybean yellow mottle mosaic virus, Furcraea necrotic streak virus, Maize chlorotic mottle virus, Cocksfoot mild mosaic virus, Panicum mosaic virus, Thin paspalum asymptomatic virus, Clematis chlorotic mottle virus, Elderberry latent virus, Pelargonium chlorotic ring pattern virus, Pelargonium line pattern virus, Pelargonium ringspot virus, Rosa rugosa leaf distortion virus, Artichoke mottled crinkle virus, Carnation Italian ringspot virus, Cucumber Bulgarian latent virus, Cucumber necrosis virus, Cymbidium ringspot virus, Eggplant mottled crinkle virus, Grapevine Algerian latent virus, Havel River virus, Lato River virus, Limonium flower distortion virus, Moroccan pepper virus, Neckar River virus, Pelargonium leaf curl virus, Pelargonium necrotic spot virus, Petunia asteroid mosaic virus, Sitke waterborne virus, Tomato bushy stunt virus, Maize necrotic streak virus, Ahlum waterborne virus, Bean mild mosaic virus, Chenopodium necrosis virus, Cucumber soil-borne virus, Trailing lespedeza virus 1, Weddel waterborne virus, Carnation ringspot virus, Red clover necrotic mosaic virus, Sweet clover necrotic mosaic virus, Escherichia virus F1, Escherichia virus Qbeta, Escherichia virus BZ13, Escherichia virus MS2, Saccharomyces 20S RNA narnavirus, Saccharomyces 23S RNA narnavirus, Cryphonectria mitovirus 1, Ophiostoma mitovirus 4, Ophiostoma mitovirus 5, Ophiostoma mitovirus 6, Ophiostoma mitovirus 3a, Botrytis botoulivirus, Sclerotinia botoulivirus 2, Magnaporthe magoulivirus 1, Rhizoctonia magoulivirus 1, Cassava virus C, Epirus cherry virus, Ourmia melon virus, Sclerotinia scleroulivirus 1, Soybean scleroulivirus 1, Soybean scleroulivirus 2, Beihai yingvirus, Charybdis yingvirus, Hubei yingvirus, Sanxia yingvirus, Shahe yingvirus, Wenzhou yingvirus, Wuhan yingvirus, Xinzhou yingvirus, Blueberry mosaic associated ophiovirus, Citrus psorosis ophiovirus, Freesia sneak ophiovirus, Lettuce ring necrosis ophiovirus, Mirafiori lettuce big-vein ophiovirus, Ranunculus white mottle ophiovirus, Tulip mild mottle mosaic ophiovirus, Argas mivirus, Barnacle mivirus, Beetle mivirus, Bole mivirus, Brunnich mivirus, Changping mivirus, Charybdis mivirus, Cockroach mivirus, Crab mivirus, Crustacean mivirus, Dermacentor mivirus, Hermit mivirus, Hippoboscid mivirus, Hubei mivirus, Hubei odonate mivirus, Imjin mivirus, Lacewing mivirus, Lishi mivirus, Lonestar mivirus, Louse fly mivirus, Mosquito mivirus, Myriapod mivirus, Odonate mivirus, Sanxia mivirus, Shayang mivirus, Suffolk mivirus, Taiyuan mivirus, Wenling mivirus, Wuhan mivirus, Xinzhou mivirus, Barnacle hexartovirus, Caligid hexartovirus, Beihai peropuvirus, Hubei peropuvirus, Odonate peropuvirus, Pillworm peropuvirus, Pteromalus puparum peropuvirus, Woodlouse peropuvirus, Queensland carbovirus, Southwest carbovirus, Sharpbelly cultervirus, Elapid 1 orthobornavirus, Mammalian 1 orthobornavirus, Mammalian 2 orthobornavirus, Passeriform 1 orthobornavirus, Passeriform 2 orthobornavirus, Psittaciform 1 orthobornavirus, Psittaciform 2 orthobornavirus, Waterbird 1 orthobornavirus, Lloviu cuevavirus, Mengla dianlovirus, Bombali ebolavirus, Bundibugyo ebolavirus, Reston ebolavirus, Sudan ebolavirus, Tai Forest ebolavirus, Zaire ebolavirus, Marburg marburgvirus, Xilang striavirus, Huangjiao thamnovirus, Gerrid arlivirus, Hubei arlivirus, Lishi arlivirus, Odonate arlivirus, Tacheng arlivirus, Wuchang arlivirus, Hubei hubramonavirus, Lentinula hubramonavirus, Dadou sclerotimonavirus, Drop sclerotimonavirus, Glycine sclerotimonavirus, Hubei sclerotimonavirus, Illinois sclerotimonavirus, Phyllosphere sclerotimonavirus, Sclerotinia sclerotimonavirus, Beihai berhavirus, Echinoderm berhavirus, Sipunculid berhavirus, Beihai crustavirus, Wenling crustavirus, Wenzhou crustavirus, Midway nyavirus, Nyamanini nyavirus, Sierra Nevada nyavirus, Orinoco ornovirus, Soybean cyst nematode socyvirus, Tapeworm tapwovirus, Avian metaavulavirus 2, Avian metaavulavirus 5, Avian metaavulavirus 6, Avian metaavulavirus 7, Avian metaavulavirus 8, Avian metaavulavirus 10, Avian metaavulavirus 11, Avian metaavulavirus 14, Avian metaavulavirus 15, Avian metaavulavirus 20, Avian orthoavulavirus 1, Avian orthoavulavirus 9, Avian orthoavulavirus 12, Avian orthoavulavirus 13, Avian orthoavulavirus 16, Avian orthoavulavirus 17, Avian orthoavulavirus 18, Avian orthoavulavirus 19, Avian orthoavulavirus 21, Avian orthovulavirus 21, Avian paraavulavirus 3, Avian paraavulavirus 4, Synodus synodonvirus, Oncorhynchus aquaparamyxovirus, Salmo aquaparamyxovirus, Reptilian ferlavirus, Cedar henipavirus, Ghanaian bat henipavirus, Hendra henipavirus, Mojiang henipavirus, Nipah henipavirus, Beilong jeilongvirus, Jun jeilongvirus, Lophuromys jeilongvirus 1, Lophuromys jeilongvirus 2, Miniopteran jeilongvirus, Myodes jeilongvirus, Tailam jeilongvirus, Canine morbillivirus, Cetacean morbillivirus, Feline morbillivirus, Measles morbillivirus, Phocine morbillivirus, Rinderpest morbillivirus, Small ruminant morbillivirus, Mossman narmovirus, Myodes narmovirus, Nariva narmovirus, Tupaia narmovirus, Bovine respirovirus 3, Caprine respirovirus 3, Human respirovirus 1, Human respirovirus 3, Murine respirovirus, Porcine respirovirus 1, Squirrel respirovirus, Salem salemvirus, Human orthorubulavirus 2, Human orthorubulavirus 4, Mammalian orthorubulavirus 5, Mammalian orthorubulavirus 6, Mapuera orthorubulavirus, Mumps orthorubulavirus, Porcine orthorubulavirus, Simian orthorubulavirus, Achimota pararubulavirus 1, Achimota pararubulavirus 2, Hervey pararubulavirus, Menangle pararubulavirus, Sosuga pararubulavirus, Teviot pararubulavirus, Tioman pararubulavirus, Tuhoko pararubulavirus 1, Tuhoko pararubulavirus 2, Tuhoko pararubulavirus 3, Cynoglossus cynoglossusvirus, Hoplichthys hoplichthysvirus, Scoliodon scoliodonvirus, Avian metapneumovirus, Human metapneumovirus, Bovine orthopneumovirus, Human orthopneumovirus, Murine orthopneumovirus, Arboretum almendravirus, Balsa almendravirus, Coot Bay almendravirus, Menghai almendravirus, Puerto Almendras almendravirus, Rio Chico almendravirus, Xingshan alphanemrhavirus, Xinzhou alphanemrhavirus, Eggplant mottled dwarf alphanucleorhabdovirus, Maize Iranian mosaic alphanucleorhabdovirus, Maize mosaic alphanucleorhabdovirus, Morogoro maize-associated alphanucleorhabdovirus, Physostegia chlorotic mottle alphanucleorhabdovirus, Potato yellow dwarf alphanucleorhabdovirus, Rice yellow stunt alphanucleorhabdovirus, Taro vein chlorosis alphanucleorhabdovirus, Wheat yellow striate alphanucleorhabdovirus, Aruac arurhavirus, Inhangapi arurhavirus, Santabarbara arurhavirus, Xiburema arurhavirus, Bahia barhavirus, Muir barhavirus, Alfalfa betanucleorhabdovirus, Blackcurrant betanucleorhabdovirus, Datura yellow vein betanucleorhabdovirus, Sonchus yellow net betanucleorhabdovirus, Sowthistle yellow vein betanucleorhabdovirus, Trefoil betanucleorhabdovirus, Caligus caligrhavirus, Lepeophtheirus caligrhavirus, Salmonlouse caligrhavirus, Curionopolis curiovirus, Iriri curiovirus, Itacaiunas curiovirus, Rochambeau curiovirus, Alfalfa dwarf cytorhabdovirus, Barley yellow striate mosaic cytorhabdovirus, Broccoli necrotic yellows cytorhabdovirus, Cabbage cytorhabdovirus, Colocasia bobone disease-associated cytorhabdovirus, Festuca leaf streak cytorhabdovirus, Lettuce necrotic yellows cytorhabdovirus, Lettuce yellow mottle cytorhabdovirus, Maize yellow striate cytorhabdovirus, Maize-associated cytorhabdovirus, Northern cereal mosaic cytorhabdovirus, Papaya cytorhabdovirus, Persimmon cytorhabdovirus, Raspberry vein chlorosis cytorhabdovirus, Rice stripe mosaic cytorhabdovirus, Sonchus cytorhabdovirus 1, Strawberry crinkle cytorhabdovirus, Tomato yellow mottle-associated cytorhabdovirus, Wheat American striate mosaic cytorhabdovirus, Wuhan 4 insect cytorhabdovirus, Wuhan 5 insect cytorhabdovirus, Wuhan 6 insect cytorhabdovirus, Yerba mate chlorosis-associated cytorhabdovirus, Citrus chlorotic spot dichorhavirus, Citrus leprosis N dichorhavirus, Clerodendrum chlorotic spot dichorhavirus, Coffee ringspot dichorhavirus, Orchid fleck dichorhavirus, Adelaide River ephemerovirus, Berrimah ephemerovirus, Bovine fever ephemerovirus, Kimberley ephemerovirus, Koolpinyah ephemerovirus, Kotonkan ephemerovirus, Obodhiang ephemerovirus, Yata ephemerovirus, Maize fine streak gammanucleorhabdovirus, Flanders hapavirus, Gray Lodge hapavirus, Hart Park hapavirus, Holmes hapavirus, Joinjakaka hapavirus, Kamese hapavirus, La Joya hapavirus, Landjia hapavirus, Manitoba hapavirus, Marco hapavirus, Mosqueiro hapavirus, Mossuril hapavirus, Ngaingan hapavirus, Ord River hapavirus, Parry Creek hapavirus, Wongabel hapavirus, Barur ledantevirus, Fikirini ledantevirus, Fukuoka ledantevirus, Kanyawara ledantevirus, Kern Canyon ledantevirus, Keuraliba ledantevirus, Kolente ledantevirus, Kumasi ledantevirus, Le Dantec ledantevirus, Mount Elgon bat ledantevirus, Nishimuro ledantevirus, Nkolbisson ledantevirus, Oita ledantevirus, Vaprio ledantevirus, Wuhan ledantevirus, Yongjia ledantevirus, Lonestar zarhavirus, Aravan lyssavirus, Australian bat lyssavirus, Bokeloh bat lyssavirus, Duvenhage lyssavirus, European bat 1 lyssavirus, European bat 2 lyssavirus, Gannoruwa bat lyssavirus, Ikoma lyssavirus, Irkut lyssavirus, Khujand lyssavirus, Lagos bat lyssavirus, Lleida bat lyssavirus, Mokola lyssavirus, Rabies lyssavirus, Shimoni bat lyssavirus, Taiwan bat lyssavirus, West Caucasian bat lyssavirus, Moussa mousrhavirus, Hirame novirhabdovirus, Piscine novirhabdovirus, Salmonid novirhabdovirus, Snakehead novirhabdovirus, Culex ohlsrhavirus, Northcreek ohlsrhavirus, Ohlsdorf ohlsrhavirus, Riverside ohlsrhavirus, Tongilchon ohlsrhavirus, Anguillid perhabdovirus, Perch perhabdovirus, Sea trout perhabdovirus, Connecticut sawgrhavirus, Island sawgrhavirus, Minto sawgrhavirus, Sawgrass sawgrhavirus, Drosophila affinis sigmavirus, Drosophila ananassae sigmavirus, Drosophila immigrans sigmavirus, Drosophila melanogaster sigmavirus, Drosophila obscura sigmavirus, Drosophila tristis sigmavirus, Muscina stabulans sigmavirus, Carp sprivivirus, Pike fry sprivivirus, Almpiwar sripuvirus, Chaco sripuvirus, Charleville sripuvirus, Cuiaba sripuvirus, hainan sripuvirus, Niakha sripuvirus, Sena Madureira sripuvirus, Sripur sripuvirus, Garba sunrhavirus, Harrison sunrhavirus, Kwatta sunrhavirus, Oakvale sunrhavirus, Sunguru sunrhavirus, Walkabout sunrhavirus, Bas-Congo tibrovirus, Beatrice Hill tibrovirus, Coastal Plains tibrovirus, Ekpoma 1 tibrovirus, Ekpoma 2 tibrovirus, Sweetwater Branch tibrovirus, Tibrogargan tibrovirus, Durham tupavirus, Klamath tupavirus, Tupaia tupavirus, Lettuce big-vein associated varicosavirus, Alagoas vesiculovirus, American bat vesiculovirus, Carajas vesiculovirus, Chandipura vesiculovirus, Cocal vesiculovirus, Indiana vesiculovirus, Isfahan vesiculovirus, Jurona vesiculovirus, Malpais Spring vesiculovirus, Maraba vesiculovirus, Morreton vesiculovirus, New Jersey vesiculovirus, Perinet vesiculovirus, Piry vesiculovirus, Radi vesiculovirus, Yug Bogdanovac vesiculovirus, Zahedan zarhavirus, Reptile sunshinevirus 1, Bolahun anphevirus, Dipteran anphevirus, Drosophilid anphevirus, Odonate anphevirus, Orthopteran anphevirus, Shuangao anphevirus, Xincheng anphevirus, Beihai yuyuevirus, Shahe yuyuevirus, Hairy antennavirus, Striated antennavirus, Haartman hartmanivirus, Muikkunen hartmanivirus, Schoolhouse hartmanivirus, Zurich hartmanivirus, Allpahuayo mammarenavirus, Alxa mammarenavirus, Argentinian mammarenavirus, Bear Canyon mammarenavirus, Brazilian mammarenavirus, Cali mammarenavirus, Chapare mammarenavirus, Chevrier mammarenavirus, Cupixi mammarenavirus, Flexal mammarenavirus, Gairo mammarenavirus, Guanarito mammarenavirus, Ippy mammarenavirus, Lassa mammarenavirus, Latino mammarenavirus, Loei River mammarenavirus, Lujo mammarenavirus, Luna mammarenavirus, Lunk mammarenavirus, Lymphocytic choriomeningitis mammarenavirus, Machupo mammarenavirus, Mariental mammarenavirus, Merino Walk mammarenavirus, Mobala mammarenavirus, Mopeia mammarenavirus, Okahandja mammarenavirus, Oliveros mammarenavirus, Paraguayan mammarenavirus, Pirital mammarenavirus, Planalto mammarenavirus, Ryukyu mammarenavirus, Serra do Navio mammarenavirus, Solwezi mammarenavirus, Souris mammarenavirus, Tacaribe mammarenavirus, Tamiami mammarenavirus, Wenzhou mammarenavirus, Whitewater Arroyo mammarenavirus, Xapuri mammarenavirus, California reptarenavirus, Giessen reptarenavirus, Golden reptarenavirus, Ordinary reptarenavirus, Rotterdam reptarenavirus, Crustacean lincruvirus, Actinidia chlorotic ringspot-associated emaravirus, Blackberry leaf mottle associated emaravirus, European mountain ash ringspot-associated emaravirus, Fig mosaic emaravirus, High Plains wheat mosaic emaravirus, Pigeonpea sterility mosaic emaravirus 1, Pigeonpea sterility mosaic emaravirus 2, Pistacia emaravirus B, Raspberry leaf blotch emaravirus, Redbud yellow ringspot-associated emaravirus, Rose rosette emaravirus, Batfish actinovirus, Goosefish actinovirus, Spikefish actinovirus, Hagfish agnathovirus, Brno loanvirus, Longquan loanvirus, Laibin mobatvirus, Nova mobatvirus, Quezon mobatvirus, Andes orthohantavirus, Asama orthohantavirus, Asikkala orthohantavirus, Bayou orthohantavirus, Black Creek Canal orthohantavirus, Bowe orthohantavirus, Bruges orthohantavirus, Cano Delgadito orthohantavirus, Cao Bang orthohantavirus, Choclo orthohantavirus, Dabieshan orthohantavirus, Dobrava-Belgrade orthohantavirus, El Moro Canyon orthohantavirus, Fugong orthohantavirus, Fusong orthohantavirus, Hantaan orthohantavirus, Jeju orthohantavirus, Kenkeme orthohantavirus, Khabarovsk orthohantavirus, Laguna Negra orthohantavirus, Luxi orthohantavirus, Maporal orthohantavirus, Montano orthohantavirus, Necocli orthohantavirus, Oxbow orthohantavirus, Prospect Hill orthohantavirus, Puumala orthohantavirus, Rockport orthohantavirus, Sangassou orthohantavirus, Seewis orhtohantavirus, Seoul orthohantavirus, Sin Nombre orthohantavirus, Thailand orthohantavirus, Tigray orthohantavirus, Tula orthohantavirus, Yakeshi orthohantavirus, Imjin thottimvirus, Thottopalayam thottimvirus, Gecko reptillovirus, Leptomonas shilevirus, Myriapod hubavirus, Artashat orthonairovirus, Chim orthonairovirus, Crimean-Congo hemorrhagic fever orthonairovirus, Dera Ghazi Khan orthonairovirus, Dugbe orthonairovirus, Estero Real orthonairovirus, Hazara orthonairovirus, Hughes orthonairovirus, Kasokero orthonairovirus, Keterah orthonairovirus, Nairobi sheep disease orthonairovirus, Qalyub orthonairovirus, Sakhalin orthonairovirus, Tamdy orthonairovirus, Thiafora orthonairovirus, Spider shaspivirus, Strider striwavirus, Herbert herbevirus, Kibale herbevirus, Tai herbevirus, Acara orthobunyavirus, Aino orthobunyavirus, Akabane orthobunyavirus, Alajuela orthobunyavirus, Anadyr orthobunyavirus, Anhembi orthobunyavirus, Anopheles A orthobunyavirus, Anopheles B orthobunyavirus, Bakau orthobunyavirus, Batai orthobunyavirus, Batama orthobunyavirus, Bellavista orthobunyavirus, Benevides orthobunyavirus, Bertioga orthobunyavirus, Bimiti orthobunyavirus, Birao orthobunyavirus, Botambi orthobunyavirus, Bozo orthobunyavirus, Bunyamwera orthobunyavirus, Bushbush orthobunyavirus, Buttonwillow orthobunyavirus, Bwamba orthobunyavirus, Cache Valley orthobunyavirus, Cachoeira Porteira orthobunyavirus, California encephalitis orthobunyavirus, Capim orthobunyavirus, Caraparu orthobunyavirus, Cat Que orthobunyavirus, Catu orthobunyavirus, Enseada orthobunyavirus, Faceys paddock orthobunyavirus, Fort Sherman orthobunyavirus, Gamboa orthobunyavirus, Guajara orthobunyavirus, Guama orthobunyavirus, Guaroa orthobunyavirus, Iaco orthobunyavirus, Ilesha orthobunyavirus, Ingwavuma orthobunyavirus, Jamestown Canyon orthobunyavirus, Jatobal orthobunyavirus, Kaeng Khoi orthobunyavirus, Kairi orthobunyavirus, Keystone orthobunyavirus, Koongol orthobunyavirus, La Crosse orthobunyavirus, Leanyer orthobunyavirus, Lumbo orthbunyavirus, Macaua orthobunyavirus, Madrid orthobunyavirus, Maguari orthobunyavirus, Main Drain orthobunyavirus, Manzanilla orthobunyavirus, Marituba orthobunyavirus, Melao orthobunyavirus, Mermet orthobunyavirus, Minatitlan orthobunyavirus, MPoko orthobunyavirus, Nyando orthobunyavirus, Olifantsvlei orthobunyavirus, Oriboca orthobunyavirus, Oropouche orthobunyavirus, Patois orthobunyavirus, Peaton orthobunyavirus, Potosi orthobunyavirus, Sabo orthobunyavirus, San Angelo orthobunyavirus, Sango orthobunyavirus, Schmallenberg orthobunyavirus, Serra do Navio orthobunyavirus, Shuni orthobunyavirus, Simbu orthobunyavirus, Snowshoe hare orthobunyavirus, Sororoca orthobunyavirus, Tacaiuma orthobunyavirus, Tahyna orthobunyavirus, Tataguine orthobunyavirus, Tensaw orthobunyavirus, Tete orthobunyavirus, Thimiri orthobunyavirus, Timboteua orthobunyavirus, Trivittatus orthobunyavirus, Turlock orthobunyavirus, Utinga orthobunyavirus, Witwatersrand orthobunyavirus, Wolkberg orthobunyavirus, Wyeomyia orthobunyavirus, Zegla orthobunyavirus, Caimito pacuvirus, Chilibre pacuvirus, Pacui pacuvirus, Rio Preto da Eva pacuvirus, Tapirape pacuvirus, Insect shangavirus, Ferak feravirus, Jonchet jonvirus, Anopheles orthophasmavirus, Culex orthophasmavirus, Ganda orthophasmavirus, Kigluaik phantom orthophasmavirus, Odonate orthophasmavirus, Qingling orthophasmavirus, Wuchang cockroach orthophasmavirus 1, Wuhan mosquito orthophasmavirus 1, Wuhan mosquito orthophasmavirus 2, Sanxia sawastrivirus, Insect wuhivirus, Bhanja bandavirus, Dabie bandavirus, Guertu bandavirus, Heartland bandavirus, Hunter Island bandavirus, Kismaayo bandavirus, Lone Star bandavirus, Dipteran beidivirus, Citrus coguvirus, Coguvirus eburi, Entoleuca entovirus, Cumuto goukovirus, Gouleako goukovirus, Yichang insect goukovirus, Horsefly horwuvirus, Dipteran hudivirus, Lepidopteran hudovirus, Blackleg ixovirus, Norway ixovirus, Scapularis ixovirus, Laurel Lake laulavirus, Lentinula lentinuvirus, Mothra mobuvirus, Badu phasivirus, Dipteran phasivirus, Fly phasivirus, Phasi Charoen-like phasivirus, Wutai mosquito phasivirus, Adana phlebovirus, Aguacate phlebovirus, Alcube phlebovirus, Alenquer phlebovirus, Ambe phlebovirus, Anhanga phlebovirus, Arumowot phlebovirus, Buenaventura phlebovirus, Bujaru phlebovirus, Cacao phlebovirus, Campana phlebovirus, Candiru phlebovirus, Chagres phlebovirus, Cocle phlebovirus, Dashli phlebovirus, Durania phlebovirus, Echarate phlebovirus, Frijoles phlebovirus, Gabek phlebovirus, Gordil phlebovirus, Icoaraci phlebovirus, Itaituba phlebovirus, Itaporanga phlebovirus, Ixcanal phlebovirus, Karimabad phlebovirus, La Gloria phlebovirus, Lara phlebovirus, Leticia phlebovirus, Maldonado phlebovirus, Massilia phlebovirus, Medjerda phlebovirus, Mona Grita phlebovirus, Mukawa phlebovirus, Munguba phlebovirus, Naples phlebovirus, Nique phlebovirus, Ntepes phlebovirus, Odrenisrou phlebovirus, Oriximina phlebovirus, Pena Blanca phlebovirus, Punique phlebovirus, Punta Toro phlebovirus, Rift Valley fever phlebovirus, Rio Grande phlebovirus, Saint Floris phlebovirus, Salanga phlebovirus, Salehabad phlebovirus, Salobo phlabovirus, Sicilian phlebovirus, Tapara phlebovirus, Tehran phlebovirus, Tico phebovirus, Toros phlebovirus, Toscana phlebovirus, Tres Almendras phlebovirus, Turuna phlebovirus, Uriurana phlebovirus, Urucuri phlebovirus, Viola phlebovirus, Zerdali phlebovirus, Pidgey pidchovirus, Apple rubodvirus 1, Apple rubodvirus 2, Echinochloa hoja blanca tenuivirus, Iranian wheat stripe tenuivirus, Maize stripe tenuivirus, Melon tenuivirus, Rice grassy stunt tenuivirus, Rice hoja blanca tenuivirus, Rice stripe tenuivirus, Urochloa hoja blanca tenuivirus, American dog uukuvirus, Dabieshan uukuvirus, Grand Arbaud uukuvirus, Huangpi uukuvirus, Kabuto mountain uukuvirus, Kaisodi uukuvirus, Lihan uukuvirus, Murre uukuvirus, Pacific coast uukuvirus, Precarious Point uukuvirus, Rukutama uukuvirus, Schmidt uukuvirus, Silverwater uukuvirus, Tacheng uukuvirus, Uukuniemi uukuvirus, Yongjia uukuvirus, Zaliv Terpeniya uukuvirus, Shrimp wenrivirus, Alstroemeria necrotic streak orthotospovirus, Alstroemeria yellow spot orthotospovirus, Bean necrotic mosaic orthotospovirus, Calla lily chlorotic spot orthotospovirus, Capsicum chlorosis orthotospovirus, Chrysanthemum stem necrosis orthotospovirus, Groundnut bud necrosis orthotospovirus, Groundnut chlorotic fan spot orthotospovirus, Groundnut ringspot orthotospovirus, Groundnut yellow spot orthotospovirus, Hippeastrum chlorotic ringspot orthotospovirus, Impatiens necrotic spot orthotospovirus, Iris yellow spot orthotospovirus, Melon severe mosaic orthotospovirus, Melon yellow spot orthotospovirus, Mulberry vein banding associated orthotospovirus, Pepper chlorotic spot orthotospovirus, Polygonum ringspot orthotospovirus, Soybean vein necrosis orthotospovirus, Tomato chlorotic spot orthotospovirus, Tomato spotted wilt orthotospovirus, Tomato yellow ring orthotospovirus, Tomato zonate spot orthotospovirus, Watermelon bud necrosis orthotospovirus, Watermelon silver mottle orthotospovirus, Zucchini lethal chlorosis orthotospovirus, Millipede wumivirus, Tilapia tilapinevirus, Influenza A virus, Influenza B virus, Influenza D virus, Influenza C virus, Salmon isavirus, Johnston Atoll quaranjavirus, Quaranfil quaranjavirus, Dhori thogotovirus, Thogoto thogotovirus, Allium cepa amalgavirus 1, Allium cepa amalgavirus 2, Blueberry latent virus, Rhododendron virus A, Southern tomato virus, Spinach amalgavirus 1, Vicia cryptic virus M, Zoostera marina amalgavirus 1, Zoostera marina amalgavirus 2, Zygosaccharomyces bailii virus Z, Cryphonectria hypovirus 1, Cryphonectria hypovirus 2, Cryphonectria hypovirus 3, Cryphonectria hypovirus 4, Beet cryptic virus 1, Carrot cryptic virus, Cherry chlorotic rusty spot associated partitivirus, Chondrostereum purpureum cryptic virus 1, Flammulina velutipes browning virus, Helicobasidium mompa partitivirus V70, Heterobasidion partitivirus 1, Heterobasidion partitivirus 3, Heterobasidion partitivirus 12, Heterobasidion partitivirus 13, Heterobasidion partitivirus 15, Rosellinia necatrix partitivirus 2, Vicia cryptic virus, White clover cryptic virus 1, Atkinsonella hypoxylon virus, Cannabis cryptic virus, Ceratocystis resinifera virus 1, Crimson clover cryptic virus 2, Dill cryptic virus 2, Fusarium poae virus 1, Heterobasidion partitivirus 2, Heterobasidion partitivirus 7, Heterobasidion partitivirus 8, Heterobasidion partitivirus P, Hop trefoil cryptic virus 2, Pleurotus ostreatus virus 1, Primula malacoides virus 1, Red clover cryptic virus 2, Rhizoctonia solani virus 717, Rosellinia necatrix virus 1, White clover cryptic virus 2, Cryptosporidium parvum virus 1, Beet cryptic virus 2, Beet cryptic virus 3, Fig cryptic virus, Pepper cryptic virus 1, Pepper cryptic virus 2, Aspergillus ochraceous virus, Discula destructiva virus 1, Discula destructiva virus 2, Fusarium solani virus 1, Gremmeniella abietina RNA virus MS1, Ophiostoma partitivirus 1, Penicillium stoloniferum virus F, Penicillium stoloniferum virus S, Agaricus bisporus virus 4, Alfalfa cryptic virus 1, Carnation cryptic virus 1, Carrot temperate virus 1, Carrot temperate virus 2, Carrot temperate virus 3, Carrot temperate virus 4, Gaeumannomyces graminis virus 0196A, Gaeumannomyces graminis virus T1A, Hop trefoil cryptic virus 1, Hop trefoil cryptic virus 3, Radish yellow edge virus, Ryegrass cryptic virus, Spinach temperate virus, White clover cryptic virus 3, Beihai picobirnavirus, Equine picobirnavirus, Human picobirnavirus, Aplysia abyssovirus 1, Muarterivirus afrigant, Alphaarterivirus equid, Lambdaarterivirus afriporav, Deltaarterivirus hemfev, Epsilonarterivirus hemcep, Epsilonarterivirus safriver, Epsilonarterivirus zamalb, Etaarterivirus ugarco 1, Iotaarterivirus debrazmo, Iotaarterivirus kibreg 1, Iotaarterivirus pejah, Thetaarterivirus kafuba, Thetaarterivirus mikelba 1, Zetaarterivirus ugarco 1, Betaarterivirus suid 2, Betaarterivirus chinrav 1, Betaarterivirus ninrav, Betaarterivirus sheoin, Betaarterivirus suid 1, Betaarterivirus timiclar, Gammaarterivirus lacdeh, Nuarterivirus guemel, Kappaarterivirus wobum, Chinturpovirus 1, Ptyasnivirus 1, Oligodon snake nidovirus 1, Microhyla letovirus 1, Bat coronavirus CDPHE15, Bat coronavirus HKU10, Rhinolophus ferrumequinum alphacoronavirus HuB-2013, Human coronavirus 229E, Lucheng Rn rat coronavirus, Mink coronavirus 1, Miniopterus bat coronavirus 1, Miniopterus bat coronavirus HKU8, Myotis ricketti alphacoronavirus Sax-2011, Nyctalus velutinus alphacoronavirus SC-2013, Pipistrellus kuhlii coronavirus 3398, Porcine epidemic diarrhea virus, Scotophilus bat coronavirus 512, Rhinolophus bat coronavirus HKU2, Human coronavirus NL63, NL63-related bat coronavirus strain BtKYNL63-9b, Sorex araneus coronavirus T14, Suncus murinus coronavirus X74, Alphacoronavirus 1, Betacoronavirus 1, China Rattus coronavirus HKU24, Human coronavirus HKU1, Murine coronavirus, Myodes coronavirus 2JL14, Bat Hp-betacoronavirus Zhejiang2013, Hedgehog coronavirus 1, Middle East respiratory syndrome-related coronavirus, Pipistrellus bat coronavirus HKU5, Tylonycteris bat coronavirus HKU4, Eidolon bat coronavirus C704, Rousettus bat coronavirus GCCDC1, Rousettus bat coronavirus HKU9, Severe acute respiratory syndrome-related coronavirus, Wigeon coronavirus HKU20, Bulbul coronavirus HKU11, Common moorhen coronavirus HKU21, Coronavirus HKU15, Munia coronavirus HKU13, White-eye coronavirus HKU16, Night heron coronavirus HKU19, Goose coronavirus CB17, Beluga whale coronavirus SW1, Avian coronavirus, Avian coronavirus 9203, Duck coronavirus 2714, Turrinivirus 1, Botrylloides leachii nidovirus, Alphamesonivirus 4, Alphamesonivirus 8, Alphamesonivirus 5, Alphamesonivirus 7, Alphamesonivirus 2, Alphamesonivirus 3, Alphamesonivirus 9, Alphamesonivirus 1, Alphamesonivirus 10, Alphamesonivirus 6, Planidovirus 1, Nangarvirus 1, Halfbeak nidovirus 1, Charybnivirus 1, Decronivirus 1, Paguronivirus 1, Gill-associated virus, Okavirus 1, Yellow head virus, White bream virus, Fathead minnow nidovirus 1, Chinook salmon nidovirus 1, Bovine nidovirus 1, Hebius tobanivirus 1, Infratovirus 1, Lycodon tobanivirus 1, Ball python nidovirus 1, Morelia tobanivirus 1, Berisnavirus 1, Shingleback nidovirus 1, Sectovirus 1, Bovine torovirus, Equine torovirus, Porcine torovirus, Bavaria virus, European brown hare syndrome virus, Rabbit hemorrhagic disease virus, Minovirus A, Nacovirus A, Newbury 1 virus, Norwalk virus, Recovirus A, Nordland virus, Sapporo virus, Saint Valerien virus, Feline calicivirus, Vesicular exanthema of swine virus, Acute bee paralysis virus, Israeli acute paralysis virus, Kashmir bee virus, Mud crab virus, Solenopsis invicta virus 1, Taura syndrome virus, Aphid lethal paralysis virus, Cricket paralysis virus, Drosophila C virus, Rhopalosiphum padi virus, Black queen cell virus, Himetobi P virus, Homalodisca coagulata virus 1, Plautia stali intestine virus, Triatoma virus, Antheraea pernyi iflavirus, Brevicoryne brassicae virus, Deformed wing virus, Dinocampus coccinellae paralysis virus, Ectropis obliqua virus, Infectious flacherie virus, Lygus lineolaris virus 1, Lymantria dispar iflavirus 1, Nilaparvata lugens honeydew virus 1, Perina nuda virus, Sacbrood virus, Slow bee paralysis virus, Spodoptera exigua iflavirus 1, Spodoptera exigua iflavirus 2, Varroa destructor virus 1, Chaetoceros socialis forma radians RNA virus 1, Chaetoceros tenuissimus RNA virus 01, Rhizosolenia setigera RNA virus 01, Astarnavirus, Aurantiochytrium single-stranded RNA virus 01, Jericarnavirus B, Sanfarnavirus 1, Sanfarnavirus 2, Sanfarnavirus 3, Heterosigma akashiwo RNA virus, Britarnavirus 1, Britarnavirus 4, Palmarnavirus 128, Palmarnavirus 473, Britarnavirus 2, Britarnavirus 3, Chaetarnavirus 2, Chaetenuissarnavirus II, Jericarnavirus A, Palmarnavirus 156, Aalivirus A, Ailurivirus A, Ampivirus A, Anativirus A, Anativirus B, Bovine rhinitis A virus, Bovine rhinitis B virus, Equine rhinitis A virus, Foot-and-mouth disease virus, Aquamavirus A, Avihepatovirus A, Avisivirus A, Avisivirus B, Avisivirus C, Boosepivirus A, Boosepivirus B, Boosepivirus C, Bopivirus A, Cardiovirus A, Cardiovirus B, Cardiovirus C, Cardiovirus D, Cardiovirus E, Cardiovirus F, Cosavirus A, Cosavirus B, Cosavirus D, Cosavirus E, Cosavirus F, Crahelivirus A, Crohivirus A, Crohivirus B, Cadicivirus A, Cadicivirus B, Diresapivirus A, Diresapivirus B, Enterovirus A, Enterovirus B, Enterovirus C, Enterovirus D, Enterovirus E, Enterovirus F, Enterovirus G, Enterovirus H, Enterovirus I, Enterovirus J, Enterovirus K, Enterovirus L, Rhinovirus A, Rhinovirus B, Rhinovirus C, Erbovirus A, Felipivirus A, Fipivirus A, Fipivirus B, Fipivirus C, Fipivirus D, Fipivirus E, Gallivirus A, Gruhelivirus A, Grusopivirus A, Grusopivirus B, Harkavirus A, Hemipivirus A, Hepatovirus A, Hepatovirus B, Hepatovirus C, Hepatovirus D, Hepatovirus E, Hepatovirus F, Hepatovirus G, Hepatovirus H, Hepatovirus I, Hunnivirus A, Aichivirus A, Aichivirus B, Aichivirus C, Aichivirus D, Aichivirus E, Aichivirus F, Kunsagivirus A, Kunsagivirus B, Kunsagivirus C, Limnipivirus A, Limnipivirus B, Limnipivirus C, Livupivirus A, Ludopivirus A, Malagasivirus A, Malagasivirus B, Megrivirus A, Megrivirus B, Megrivirus C, Megrivirus D, Megrivirus E, Mischivirus A, Mischivirus B, Mischivirus C, Mischivirus D, Mosavirus A, Mosavirus B, Mupivirus A, Myrropivirus A, Orivirus A, Oscivirus A, Parabovirus A, Parabovirus B, Parabovirus C, Parechovirus A, Parechovirus B, Parechovirus C, Parechovirus D, Parechovirus E, Parechovirus F, Pasivirus A, Passerivirus A, Passerivirus B, Pemapivirus A, Poecivirus A, Potamipivirus A, Potamipivirus B, Rabovirus A, Rabovirus B, Rabovirus C, Rabovirus D, Rafivirus A, Rafivirus B, Rafivirus C, Rohelivirus A, Rosavirus A, Rosavirus B, Rosavirus C, Sakobuvirus A, Salivirus A, Sapelovirus A, Sapelovirus B, Senecavirus A, Shanbavirus A, Sicinivirus A, Symapivirus A, Teschovirus A, Teschovirus B, Torchivirus A, Tottorivirus A, Tremovirus A, Tremovirus B, Tropivirus A, Chironomus riparius virus 1, Hubei chipolycivirus, Hubei hupolycivirus, Formica exsecta virus 3, Lasius neglectus virus 1, Lasius neglectus virus 2, Lasius niger virus 1, Linepithema humile virus 2, Monomorium pharaonis virus 1, Monomorium pharaonis virus 2, Myrmica scabrinodis virus 1, Shuangao insect virus 8, Solenopsis invicta virus 2, Solenopsis invicta virus 4, Andean potato mottle virus, Bean pod mottle virus, Bean rugose mosaic virus, Broad bean stain virus, Broad bean true mosaic virus, Cowpea mosaic virus, Cowpea severe mosaic virus, Glycine mosaic virus, Pea green mottle virus, Pea mild mosaic virus, Quail pea mosaic virus, Radish mosaic virus, Red clover mottle virus, Squash mosaic virus, Ullucus virus C, Broad bean wilt virus 1, Broad bean wilt virus 2, Cucurbit mild mosaic virus, Gentian mosaic virus, Grapevine fabavirus, Lamium mild mosaic virus, Prunus virus F, Aeonium ringspot virus, Apricot latent ringspot virus, Arabis mosaic virus, Arracacha virus A, Artichoke Aegean ringspot virus, Artichoke Italian latent virus, Artichoke yellow ringspot virus, Beet ringspot virus, Blackcurrant reversion virus, Blueberry latent spherical virus, Blueberry leaf mottle virus, Cassava American latent virus, Cassava green mottle virus, Cherry leaf roll virus, Chicory yellow mottle virus, Cocoa necrosis virus, Crimson clover latent virus, Cycas necrotic stunt virus, Grapevine Anatolian ringspot virus, Grapevine Bulgarian latent virus, Grapevine chrome mosaic virus, Grapevine deformation virus, Grapevine fanleaf virus, Grapevine Tunisian ringspot virus, Hibiscus latent ringspot virus, Lucerne Australian latent virus, Melon mild mottle virus, Mulberry mosaic leaf roll associated virus, Mulberry ringspot virus, Myrobalan latent ringspot virus, Olive latent ringspot virus, Peach rosette mosaic virus, Potato black ringspot virus, Potato virus B, Potato virus U, Raspberry ringspot virus, Soybean latent spherical virus, Tobacco ringspot virus, Tomato black ring virus, Tomato ringspot virus, Apple latent spherical virus, Arracacha virus B, Cherry rasp leaf virus, Currant latent virus, Stocky prune virus, Chocolate lily virus A, Dioscorea mosaic associated virus, Satsuma dwarf virus, Black raspberry necrosis virus, Strawberry mottle virus, Carrot necrotic dieback virus, Dandelion yellow mosaic virus, Parsnip yellow fleck virus, Carrot torradovirus 1, Lettuce necrotic leaf curl virus, Motherwort yellow mottle virus, Squash chlorotic leaf spot virus, Tomato marchitez virus, Tomato torrado virus, Anthriscus yellows virus, Bellflower vein chlorosis virus, Maize chlorotic dwarf virus, Rice tungro spherical virus, Strawberry latent ringspot virus, Solenopsis invicta virus 3, Nylanderia fulva virus 1, Heterocapsa circularisquama RNA virus 01, Mushroom bacilliform virus, Poinsettia latent virus, Artemisia virus A, Blueberry shoestring virus, Cocksfoot mottle virus, Cymbidium chlorotic mosaic virus, Imperata yellow mottle virus, Lucerne transient streak virus, Papaya lethal yellowing virus, Rice yellow mottle virus, Rottboellia yellow mottle virus, Ryegrass mottle virus, Sesbania mosaic virus, Solanum nodiflorum mottle virus, Southern bean mosaic virus, Southern cowpea mosaic virus, Sowbane mosaic virus, Soybean yellow common mosaic virus, Subterranean clover mottle virus, Turnip rosette virus, Velvet tobacco mottle virus, Areca palm necrotic ringspot virus, Areca palm necrotic spindle-spot virus, Bellflower veinal mottle virus, Blackberry virus Y, Barley mild mosaic virus, Barley yellow mosaic virus, Oat mosaic virus, Rice necrosis mosaic virus, Wheat spindle streak mosaic virus, Wheat yellow mosaic virus, Celery latent virus, Cassava brown streak virus, Coccinia mottle virus, Cucumber vein yellowing virus, Squash vein yellowing virus, Sweet potato mild mottle virus, Tomato mild mottle virus, Ugandan cassava brown streak virus, Alpinia mosaic virus, Alpinia oxyphylla mosaic virus, Artichoke latent virus, Broad-leafed dock virus A, Cardamom mosaic virus, Chinese yam necrotic mosaic virus, Maclura mosaic virus, Narcissus latent virus, Yam chlorotic mosaic virus, Yam chlorotic necrosis virus, Caladenia virus A, Sugarcane streak mosaic virus, Triticum mosaic virus, African eggplant mosaic virus, Algerian watermelon mosaic virus, Alstroemeria mosaic virus, Alternanthera mild mosaic virus, Amaranthus leaf mottle virus, Amazon lily mosaic virus, Angelica virus Y, Apium virus Y, Araujia mosaic virus, Arracacha mottle virus, Asparagus virus 1, Banana bract mosaic virus, Barbacena virus Y, Basella rugose mosaic virus, Bean common mosaic necrosis virus, Bean common mosaic virus, Bean yellow mosaic virus, Beet mosaic virus, Bidens mosaic virus, Bidens mottle virus, Blue squill virus A, Brugmansia mosaic virus, Brugmansia suaveolens mottle virus, Butterfly flower mosaic virus, Calanthe mild mosaic virus, Calla lily latent virus, Callistephus mottle virus, Canna yellow streak virus, Carnation vein mottle virus, Carrot thin leaf virus, Carrot virus Y, Catharanthus mosaic virus, Celery mosaic virus, Ceratobium mosaic virus, Chilli ringspot virus, Chilli veinal mottle virus, Chinese artichoke mosaic virus, Clitoria virus Y, Clover yellow vein virus, Cocksfoot streak virus, Colombian datura virus, Commelina mosaic virus, Cowpea aphid-borne mosaic virus, Cucurbit vein banding virus, Cypripedium virus Y, Cyrtanthus elatus virus A, Daphne mosaic virus, Daphne virus Y, Dasheen mosaic virus, Datura shoestring virus, Dendrobium chlorotic mosaic virus, Dioscorea mosaic virus, Diuris virus Y, Donkey orchid virus A, East Asian Passiflora distortion virus, East Asian Passiflora virus, Endive necrotic mosaic virus, Euphorbia ringspot virus, Freesia mosaic virus, Fritillary virus Y, Gloriosa stripe mosaic virus, Gomphocarpus mosaic virus, Habenaria mosaic virus, Hardenbergia mosaic virus, Henbane mosaic virus, Hibbertia virus Y, Hippeastrum mosaic virus, Hyacinth mosaic virus, Impatiens flower break virus, Iris fulva mosaic virus, Iris mild mosaic virus, Iris severe mosaic virus, Japanese yam mosaic virus, Jasmine virus T, Johnsongrass mosaic virus, Kalanchoe mosaic virus, Keunjorong mosaic virus, Konjac mosaic virus, Leek yellow stripe virus, Lettuce Italian necrotic virus, Lettuce mosaic virus, Lily mottle virus, Lily virus Y, Lupinus mosaic virus, Lycoris mild mottle virus, Maize dwarf mosaic virus, Malva vein clearing virus, Mashua virus Y, Meadow saffron breaking virus, Mediterranean ruda virus, Moroccan watermelon mosaic virus, Narcissus degeneration virus, Narcissus late season yellows virus, Narcissus yellow stripe virus, Nerine yellow stripe virus, Nothoscordum mosaic virus, Onion yellow dwarf virus, Ornithogalum mosaic virus, Ornithogalum virus 2, Ornithogalum virus 3, Panax virus Y, Papaya leaf distortion mosaic virus, Papaya ringspot virus, Paris mosaic necrosis virus, Parsnip mosaic virus, Passiflora chlorosis virus, Passion fruit woodiness virus, Pea seed-borne mosaic virus, Peanut mottle virus, Pecan mosaic-associated virus, Pennisetum mosaic virus, Pepper mottle virus, Pepper severe mosaic virus, Pepper veinal mottle virus, Pepper yellow mosaic virus, Peru tomato mosaic virus, Pfaffia mosaic virus, Platycodon mild mottle virus, Pleione virus Y, Plum pox virus, Pokeweed mosaic virus, Potato virus A, Potato virus V, Potato virus Y, Potato yellow blotch virus, Ranunculus leaf distortion virus, Ranunculus mild mosaic virus, Ranunculus mosaic virus, Rhopalanthe virus Y, Saffron latent virus, Sarcochilus virus Y, Scallion mosaic virus, Shallot yellow stripe virus, Sorghum mosaic virus, Soybean mosaic virus, Spiranthes mosaic virus 3, Sudan watermelon mosaic virus, Sugarcane mosaic virus, Sunflower chlorotic mottle virus, Sunflower mild mosaic virus, Sunflower mosaic virus, Sunflower ring blotch virus, Sweet potato feathery mottle virus, Sweet potato latent virus, Sweet potato mild speckling virus, Sweet potato virus 2, Sweet potato virus C, Sweet potato virus G, Tamarillo leaf malformation virus, Telfairia mosaic virus, Telosma mosaic virus, Thunberg fritillary mosaic virus, Tobacco etch virus, Tobacco mosqueado virus, Tobacco vein banding mosaic virus, Tobacco vein mottling virus, Tomato necrotic stunt virus, Tradescantia mild mosaic virus, Tuberose mild mosaic virus, Tuberose mild mottle virus, Tulip breaking virus, Tulip mosaic virus, Turnip mosaic virus, Twisted-stalk chlorotic streak virus, Vallota mosaic virus, Vanilla distortion mosaic virus, Verbena virus Y, Watermelon leaf mottle virus, Watermelon mosaic virus, Wild melon banding virus, Wild onion symptomless virus, Wild potato mosaic virus, Wild tomato mosaic virus, Wisteria vein mosaic virus, Yam mild mosaic virus, Yam mosaic virus, Yambean mosaic virus, Zantedeschia mild mosaic virus, Zea mosaic virus, Zucchini shoestring virus, Zucchini tigre mosaic virus, Zucchini yellow fleck virus, Zucchini yellow mosaic virus, Passiflora edulis symptomless virus, Rose yellow mosaic virus, Agropyron mosaic virus, Hordeum mosaic virus, Ryegrass mosaic virus, Brome streak mosaic virus, Oat necrotic mottle virus, Tall oatgrass mosaic virus, Wheat eqlid mosaic virus, Wheat streak mosaic virus, Yellow oat grass mosaic virus, Common reed chlorotic stripe virus, Longan witches broom-associated virus, Spartina mottle virus, Avastrovirus 1, Avastrovirus 2, Avastrovirus 3, Mamastrovirus 1, Mamastrovirus 2, Mamastrovirus 3, Mamastrovirus 4, Mamastrovirus 5, Mamastrovirus 6, Mamastrovirus 7, Mamastrovirus 8, Mamastrovirus 9, Mamastrovirus 10, Mamastrovirus 11, Mamastrovirus 12, Mamastrovirus 13, Mamastrovirus 14, Mamastrovirus 15, Mamastrovirus 16, Mamastrovirus 17, Mamastrovirus 18, Mamastrovirus 19, Infectious pancreatic necrosis virus, Tellina virus, Yellowtail ascites virus, Infectious bursal disease virus, Blotched snakehead virus, Lates calcarifer birnavirus, Drosophina B birnavirus, Drosophila X virus, Mosquito X virus, Rotifer birnavirus, Tellina virus 1, Euprosterna elaeasa virus, Thosea asigna virus, Botrytis porri botybirnavirus 1, Duck hepatitis B virus, Heron hepatitis B virus, Parrot hepatitis B virus, Tibetan frog hepatitis B virus, Blue gill hepatitis B virus, Capuchin monkey hepatitis B virus, Chinese shrew hepatitis B virus, Domestic cat hepatitis B virus, Ground squirrel hepatitis virus, Hepatitis B virus, Long-fingered bat hepatitis B virus, Pomona bat hepatitis B virus, Roundleaf bat hepatitis B virus, Tai Forest hepatitis B virus, Tent-making bat hepatitis B virus, Woodchuck hepatitis virus, Woolly monkey hepatitis B virus, White sucker hepatitis B virus, Anopheles gambiae Moose virus, Antheraea semotivirus Tamy, Ascaris lumbricoides Tas virus, Bombyx mori Pao virus, Caenorhabditis elegans Cer13 virus, Drosophila melanogaster Bel virus, Drosophila melanogaster Roo virus, Drosophila semotivirus Max, Drosophila simulans Ninja virus, Schistosoma semotivirus Sinbad, Takifugu rubripes Suzu virus, Aglaonema bacilliform virus, Banana streak GF virus, Banana streak IM virus, Banana streak MY virus, Banana streak OL virus, Banana streak UA virus, Banana streak UI virus, Banana streak UL virus, Banana streak UM virus, Banana streak VN virus, Birch leaf roll-associated virus, Blackberry virus F, Bougainvillea chlorotic vein banding virus, Cacao bacilliform Sri Lanka virus, Cacao mild mosaic virus, Cacao swollen shoot CD virus, Cacao swollen shoot CE virus, Cacao swollen shoot Ghana M virus, Cacao swollen shoot Ghana N virus, Cacao swollen shoot Ghana Q virus, Cacao swollen shoot Togo A virus, Cacao swollen shoot Togo B virus, Cacao yellow vein banding virus, Canna yellow mottle associated virus, Canna yellow mottle virus, Citrus yellow mosaic virus, Codonopsis vein clearing virus, Commelina yellow mottle virus, Dioscorea bacilliform AL virus, Dioscorea bacilliform AL virus 2, Dioscorea bacilliform ES virus, Dioscorea bacilliform RT virus 1, Dioscorea bacilliform RT virus 2, Dioscorea bacilliform SN virus, Dioscorea bacilliform TR virus, Fig badnavirus 1, Gooseberry vein banding associated virus, Grapevine badnavirus 1, Grapevine Roditis leaf discoloration-associated virus, Grapevine vein clearing virus, Jujube mosaic-associated virus, Kalanchoe top-spotting virus, Mulberry badnavirus 1, Pagoda yellow mosaic associated virus, Pineapple bacilliform CO virus, Pineapple bacilliform ER virus, Piper yellow mottle virus, Rubus yellow net virus, Schefflera ringspot virus, Spiraea yellow leafspot virus, Sugarcane bacilliform Guadeloupe A virus, Sugarcane bacilliform Guadeloupe D virus, Sugarcane bacilliform IM virus, Sugarcane bacilliform MO virus, Sweet potato pakakuy virus, Taro bacilliform CH virus, Taro bacilliform virus, Wisteria badnavirus 1, Yacon necrotic mottle virus, Angelica bushy stunt virus, Atractylodes mild mottle virus, Carnation etched ring virus, Cauliflower mosaic virus, Dahlia mosaic virus, Figwort mosaic virus, Horseradish latent virus, Lamium leaf distortion virus, Mirabilis mosaic virus, Rudbeckia flower distortion virus, Soybean Putnam virus, Strawberry vein banding virus, Thistle mottle virus, Cassava vein mosaic virus, Sweet potato collusive virus, Dioscorea nummularia associated virus, Petunia vein clearing virus, Rose yellow vein virus, Sweet potato vein clearing virus, Tobacco vein clearing virus, Blueberry red ringspot virus, Cestrum yellow leaf curling virus, Peanut chlorotic streak virus, Soybean chlorotic mottle virus, Rice tungro bacilliform virus, Blueberry fruit drop associated virus, Ceratitis capitata Yoyo virus, Drosophila ananassae Tom virus, Drosophila melanogaster 17-6 virus, Drosophila melanogaster 297 virus, Drosophila melanogaster Gypsy virus, Drosophila melanogaster Idefix virus, Drosophila melanogaster Tirant virus, Drosophila melanogaster Zam virus, Drosophila virilis Tv1 virus, Trichoplusia ni TED virus, Arabidopsis thaliana Athila virus, Arabidopsis thaliana Tat4 virus, Bombyx mori Mag virus, Caenorhabditis elegans Cer1 virus, Cladosporium fulvum T-1 virus, Dictyostelium discoideum Skipper virus, Drosophila buzzatii Osvaldo virus, Drosophila melanogaster 412 virus, Drosophila melanogaster Blastopia virus, Drosophila melanogaster Mdg1 virus, Drosophila melanogaster Mdg3 virus, Drosophila melanogaster Micropia virus, Drosophila virilis Ulysses virus, Fusarium oxysporum Skippy virus, Lilium henryi Dell virus, Saccharomyces cerevisiae Ty3 virus, Schizosaccharomyces pombe Tf1 virus, Schizosaccharomyces pombe Tf2 virus, Takifugu rubripes Sushi virus, Tribolium castaneum Woot virus, Tripneustis gratilla SURL virus, Aedes aegypti Mosqcopia virus, Candida albicans Tca2 virus, Candida albicans Tca5 virus, Drosophila melanogaster 1731 virus, Drosophila melanogaster copia virus, Saccharomyces cerevisiae Ty5 virus, Volvox carteri Lueckenbuesser virus, Volvox carteri Osser virus, Arabidopsis thaliana Art1 virus, Arabidopsis thaliana AtRE1 virus, Arabidopsis thaliana evelknievel virus, Arabidopsis thaliana Tal virus, Brassica oleracea Melmoth virus, Cajanus cajan Panzee virus, Glycine max Tgmr virus, Hordeum vulgare BARE-1 virus, Nicotiana tabacum Tnt1 virus, Nicotiana tabacum Tto1 virus, Oryza australiensis RIRE1 virus, Oryza longistaminata Retrofit virus, Physarum polycephalum Tp1 virus, Saccharomyces cerevisiae Ty1 virus, Saccharomyces cerevisiae Ty2 virus, Saccharomyces cerevisiae Ty4 virus, Solanum tuberosum Tst1 virus, Triticum aestivum WIS2 virus, Zea mays Hopscotch virus, Zea mays Sto4 virus, Arabidopsis thaliana Endovir virus, Glycine max SIRE1 virus, Lycopersicon esculentum ToRTL1 virus, Zea mays Opie2 virus, Zea mays Prem2 virus, Phaseolus vulgaris Tpv2-6 virus, Avian carcinoma Mill Hill virus 2, Avian leukosis virus, Avian myeloblastosis virus, Avian myelocytomatosis virus 29, Avian sarcoma virus CT10, Fujinami sarcoma virus, Rous sarcoma virus, UR2 sarcoma virus, Y73 sarcoma virus, Jaagsiekte sheep retrovirus, Langur virus, Mason-Pfizer monkey virus, Mouse mammary tumor virus, Squirrel monkey retrovirus, Bovine leukemia virus, Primate T-lymphotropic virus 1, Primate T-lymphotropic virus 2, Primate T-lymphotropic virus 3, Walleye dermal sarcoma virus, Walleye epidermal hyperplasia virus 1, Walleye epidermal hyperplasia virus 2, Chick syncytial virus, Feline leukemia virus, Finkel-Biskis-Jinkins murine sarcoma virus, Gardner-Arnstein feline sarcoma virus, Gibbon ape leukemia virus, Guinea pig type-C oncovirus, Hardy-Zuckerman feline sarcoma virus, Harvey murine sarcoma virus, Kirsten murine sarcoma virus, Koala retrovirus, Moloney murine sarcoma virus, Murine leukemia virus, Porcine type-C oncovirus, Reticuloendotheliosis virus, Snyder-Theilen feline sarcoma virus, Trager duck spleen necrosis virus, Viper retrovirus, Woolly monkey sarcoma virus, Bovine immunodeficiency virus, Caprine arthritis encephalitis virus, Equine infectious anemia virus, Feline immunodeficiency virus, Human immunodeficiency virus 1, Human immunodeficiency virus 2, Jembrana disease virus, Puma lentivirus, Simian immunodeficiency virus, Visna-maedi virus, Bovine foamy virus, Equine foamy virus, Feline foamy virus, Brown greater galago prosimian foamy virus, Bornean orangutan simian foamy virus, Central chimpanzee simian foamy virus, Cynomolgus macaque simian foamy virus, Eastern chimpanzee simian foamy virus, Grivet simian foamy virus, Guenon simian foamy virus, Japanese macaque simian foamy virus, Rhesus macaque simian foamy virus, Spider monkey simian foamy virus, Squirrel monkey simian foamy virus, Taiwanese macaque simian foamy virus, Western chimpanzee simian foamy virus, Western lowland gorilla simian foamy virus, White-tufted-ear marmoset simian foamy virus, Yellow-breasted capuchin simian foamy virus, Aspergillus fumigatus polymycovirus 1, Aspergillus spelaeus polymycovirus 1, Beauveria bassiana polymycovirus 1, Botryoshaeria dothidea polymycovirus 1, Cladosporium cladosporioides polymycovirus 1, Colletotrichum camelliae polymycovirus 1, Fusarium redolens polymycovirus 1, Magnaporthe oryzae polymycovirus 1, Penicillium digitatum polymycovirus 1, Penicillum brevicompactum polymycovirus 1, Macrobrachium satellite virus 1, Tobacco albetovirus 1, Tobacco albetovirus 2, Tobacco albetovirus 3, Maize aumaivirus 1, Panicum papanivirus 1, Tobacco virtovirus 1, Acanthocystis turfacea chlorella virus 1, Hydra viridis Chlorella virus 1, Paramecium bursaria Chlorella virus 1, Paramecium bursaria Chlorella virus A1, Paramecium bursaria Chlorella virus AL1A, Paramecium bursaria Chlorella virus AL2A, Paramecium bursaria Chlorella virus BJ2C, Paramecium bursaria Chlorella virus CA4A, Paramecium bursaria Chlorella virus CA4B, Paramecium bursaria Chlorella virus IL3A, Paramecium bursaria Chlorella virus NC1A, Paramecium bursaria Chlorella virus NE8A, Paramecium bursaria Chlorella virus NY2A, Paramecium bursaria Chlorella virus NYs1, Paramecium bursaria Chlorella virus SC1A, Paramecium bursaria Chlorella virus XY6E, Paramecium bursaria Chlorella virus XZ3A, Paramecium bursaria Chlorella virus XZ4A, Paramecium bursaria Chlorella virus XZ4C, Emiliania huxleyi virus 86, Ectocarpus fasciculatus virus a, Ectocarpus siliculosus virus 1, Ectocarpus siliculosus virus a, Feldmannia irregularis virus a, Feldmannia species virus, Feldmannia species virus a, Hincksia hinckiae virus a, Myriotrichia clavaeformis virus a, Pilayella littoralis virus 1, Micromonas pusilla virus SP1, Ostreococcus tauri virus OtV5, Chrysochromulina brevifilum virus PW1, Heterosigma akashiwo virus 01, Cafeteria roenbergensis virus, Acanthamoeba polyphaga mimivirus, Heliothis virescens ascovirus 3a, Spodoptera frugiperda ascovirus 1a, Trichoplusia ni ascovirus 2a, Diadromus pulchellus toursvirus, Lymphocystis disease virus 1, Lymphocystis disease virus 2, Lymphocystis disease virus 3, Infectious spleen and kidney necrosis virus, Scale drop disease virus, Ambystoma tigrinum virus, Common midwife toad virus, Epizootic haematopoietic necrosis virus, Frog virus 3, Santee-Cooper ranavirus, Singapore grouper iridovirus, Anopheles minimus iridovirus, Invertebrate iridescent virus 3, Invertebrate iridescent virus 9, Invertebrate iridescent virus 22, Invertebrate iridescent virus 25, Decapod iridescent virus 1, Invertebrate iridescent virus 6, Invertebrate iridescent virus 31, Marseillevirus marseillevirus, Senegalvirus marseillevirus, Lausannevirus, Tunisvirus, African swine fever virus, Canarypox virus, Flamingopox virus, Fowlpox virus, Juncopox virus, Mynahpox virus, Penguinpox virus, Pigeonpox virus, Psittacinepox virus, Quailpox virus, Sparrowpox virus, Starlingpox virus, Turkeypox virus, Goatpox virus, Lumpy skin disease virus, Sheeppox virus, Murmansk microtuspox virus, Yokapox virus, Mule deerpox virus, Nile crocodilepox virus, Hare fibroma virus, Myxoma virus, Rabbit fibroma virus, Squirrel fibroma virus, Eastern kangaroopox virus, Western kangaroopox virus, Molluscum contagiosum virus, Sea otterpox virus, Abatino macacapox virus, Akhmeta virus, Camelpox virus, Cowpox virus, Ectromelia virus, Monkeypox virus, Raccoonpox virus, Skunkpox virus, Taterapox virus, Vaccinia virus, Variola virus, Volepox virus, Cotia virus, Bovine papular stomatitis virus, Grey sealpox virus, Orf virus, Pseudocowpox virus, Red deerpox virus, Pteropox virus, Salmon gillpox virus, Squirrelpox virus, Swinepox virus, Eptesipox virus, Tanapox virus, Yaba monkey tumor virus, Anomala cuprea entomopoxvirus, Aphodius tasmaniae entomopoxvirus, Demodema bonariensis entomopoxvirus, Dermolepida albohirtum entomopoxvirus, Figulus sublaevis entomopoxvirus, Geotrupes sylvaticus entomopoxvirus, Melolontha melolontha entomopoxvirus, Acrobasis zelleri entomopoxvirus, Adoxophyes honmai entomopoxvirus, Amsacta moorei entomopoxvirus, Arphia conspersa entomopoxvirus, Choristoneura biennis entomopoxvirus, Choristoneura conflicta entomopoxvirus, Choristoneura diversuma entomopoxvirus, Choristoneura fumiferana entomopoxvirus, Choristoneura rosaceana entomopoxvirus, Chorizagrotis auxiliaris entomopoxvirus, Heliothis armigera entomopoxvirus, Locusta migratoria entomopoxvirus, Mythimna separata entomopoxvirus, Oedaleus senegalensis entomopoxvirus, Operophtera brumata entomopoxvirus, Schistocerca gregaria entomopoxvirus, Melanoplus sanguinipes entomopoxvirus, Aedes aegypti entomopoxvirus, Camptochironomus tentans entomopoxvirus, Chironomus attenuatus entomopoxvirus, Chironomus luridus entomopoxvirus, Chironomus plumosus entomopoxvirus, Goeldichironomus holoprasinus entomopoxvirus, Diachasmimorpha entomopoxvirus, Cafeteriavirus-dependent mavirus, Mimivirus-dependent virus Sputnik, Mimivirus-dependent virus Zamilon, Sulfolobus turreted icosahedral virus 1, Sulfolobus turreted icosahedral virus 2, Pseudomonas virus PR4, Pseudomonas virus PRD1, Bacillus virus AP50, Bacillus virus Bam35, Bacillus virus GIL16, Bacillus virus Wip1, Gluconobacter virus GC1, Bovine atadenovirus D, Deer atadenovirus A, Duck atadenovirus A, Lizard atadenovirus A, Ovine atadenovirus D, Possum atadenovirus A, Psittacine atadenovirus A, Snake atadenovirus A, Duck aviadenovirus B, Falcon aviadenovirus A, Fowl aviadenovirus A, Fowl aviadenovirus B, Fowl aviadenovirus C, Fowl aviadenovirus D, Fowl aviadenovirus E, Goose aviadenovirus A, Pigeon aviadenovirus A, Pigeon aviadenovirus B, Psittacine aviadenovirus B, Psittacine aviadenovirus C, Turkey aviadenovirus B, Turkey aviadenovirus C, Turkey aviadenovirus D, Sturgeon ichtadenovirus A, Bat mastadenovirus A, Bat mastadenovirus B, Bat mastadenovirus C, Bat mastadenovirus D, Bat mastadenovirus E, Bat mastadenovirus F, Bat mastadenovirus G, Bat mastadenovirus H, Bat mastadenovirus I, Bat mastadenovirus J, Bovine mastadenovirus A, Bovine mastadenovirus B, Bovine mastadenovirus C, Canine mastadenovirus A, Deer mastadenovirus B, Dolphin mastadenovirus A, Dolphin mastadenovirus B, Equine mastadenovirus A, Equine mastadenovirus B, Human mastadenovirus A, Human mastadenovirus B, Human mastadenovirus C, Human mastadenovirus D, Human mastadenovirus E, Human mastadenovirus F, Human mastadenovirus G, Murine mastadenovirus A, Murine mastadenovirus B, Murine mastadenovirus C, Ovine mastadenovirus A, Ovine mastadenovirus B, Ovine mastadenovirus C, Platyrrhini mastadenovirus A, Polar bear mastadenovirus A, Porcine mastadenovirus A, Porcine mastadenovirus B, Porcine mastadenovirus C, Sea lion mastadenovirus A, Simian mastadenovirus A, Simian mastadenovirus B, Simian mastadenovirus C, Simian mastadenovirus D, Simian mastadenovirus E, Simian mastadenovirus F, Simian mastadenovirus G, Simian mastadenovirus H, Simian mastadenovirus I, Skunk mastadenovirus A, Squirrel mastadenovirus A, Tree shrew mastadenovirus A, Frog siadenovirus A, Great tit siadenovirus A, Penguin siadenovirus A, Raptor siadenovirus A, Skua siadenovirus A, Turkey siadenovirus A, Pseudoalteromonas virus Cr39582, Pseudoalteromonas virus PM2, Haloarcula hispanica icosahedral virus 2, Haloarcula hispanica virus PH1, Haloarcula hispanica virus SH1, Haloarcula virus HCIV1, Natrinema virus SNJ1, Thermus virus IN93, Thermus virus P23-77, Alphalipothrixvirus SBFV2, Alphalipothrixvirus SFV1, Acidianus filamentous virus 3, Acidianus filamentous virus 6, Acidianus filamentous virus 7, Acidianus filamentous virus 8, Acidianus filamentous virus 9, Sulfolobus islandicus filamentous virus, Acidianus filamentous virus 2, Deltalipothrixvirus SBFV3, Acidianus filamentous virus 1, Acidianus rod-shaped virus 1, Sulfolobus islandicus rod-shaped virus 1, Sulfolobus islandicus rod-shaped virus 2, Ageratum yellow vein Singapore alphasatellite, Cotton leaf curl Saudi Arabia alphasatellite, Ash gourd yellow vein mosaic alphasatellite, Capsicum India alphasatellite, Cleome leaf crumple alphasatellite, Croton yellow vein mosaic alphasatellite, Euphorbia yellow mosaic alphasatellite, Melon chlorotic mosaic alphasatellite, Sida Cuba alphasatellite, Tomato leaf curl New Delhi alphasatellite, Tomato leaf curl Virudhunagar alphasatellite, Tomato yellow spot alphasatellite, Whitefly associated Guatemala alphasatellite 2, Whitefly associated Puerto Rico alphasatellite 1, Ageratum enation alphasatellite, Ageratum yellow vein alphasatellite, Ageratum yellow vein China alphasatellite, Ageratum yellow vein India alphasatellite, Bhendi yellow vein alphasatellite, Cassava mosaic madagascar alphasatellite, Chilli leaf curl alphasatellite, Cotton leaf curl Egypt alphasatellite, Cotton leaf curl Gezira alphasatellite, Cotton leaf curl Lucknow alphasatellite, Cotton leaf curl Multan alphasatellite, Gossypium darwinii symptomless alphasatellite, Malvastrum yellow mosaic alphasatellite, Malvastrum yellow mosaic Cameroon alphasatellite, Pedilanthus leaf curl alphasatellite, Sida leaf curl alphasatellite, Sida yellow vein Vietnam alphasatellite, Sunflower leaf curl Karnataka alphasatellite, Synedrella leaf curl alphasatellite, Tobacco curly shoot alphasatellite, Tomato leaf curl Buea alphasatellite, Tomato leaf curl Cameroon alphasatellite, Tomato leaf curl Pakistan alphasatellite, Tomato yellow leaf curl China alphasatellite, Tomato yellow leaf curl Thailand alphasatellite, Tomato yellow leaf curl Yunnan alphasatellite, Eclipta yellow vein alphasatellite, Gossypium mustelinum symptomless alphasatellite, Hollyhock yellow vein alphasatellite, Mesta yellow vein mosaic alphasatellite, Okra enation leaf curl alphasatellite, Okra yellow crinkle Cameroon alphasatellite, Vernonia yellow vein Fujian alphasatellite, Dragonfly associated alphasatellite, Whitefly associated Guatemala alphasatellite 1, Banana bunchy top alphasatellite 1, Banana bunchy top alphasatellite 2, Banana bunchy top alphasatellite 3, Cardamom bushy dwarf alphasatellite, Milk vetch dwarf alphasatellite 2, Pea necrotic yellow dwarf alphasatellite 2, Sophora yellow stunt alphasatellite 4, Sophora yellow stunt alphasatellite 5, Subterranean clover stunt alphasatellite 2, Faba bean necrotic yellows alphasatellite 2, Milk vetch dwarf alphasatellite 3, Faba bean necrotic stunt alphasatellite, Milk vetch dwarf alphasatellite 1, Pea necrotic yellow dwarf alphasatellite 1, Sophora yellow stunt alphasatellite 2, Cow vetch latent alphasatellite, Sophora yellow stunt alphasatellite 3, Faba bean necrotic yellows alphasatellite 1, Faba bean necrotic yellows alphasatellite 3, Sophora yellow stunt alphasatellite 1, Subterranean clover stunt alphasatellite 1, Coconut foliar decay alphasatellite, Acidianus bottle-shaped virus, Torque teno virus 1, Torque teno virus 2, Torque teno virus 3, Torque teno virus 4, Torque teno virus 5, Torque teno virus 6, Torque teno virus 7, Torque teno virus 8, Torque teno virus 9, Torque teno virus 10, Torque teno virus 11, Torque teno virus 12, Torque teno virus 13, Torque teno virus 14, Torque teno virus 15, Torque teno virus 16, Torque teno virus 17, Torque teno virus 18, Torque teno virus 19, Torque teno virus 20, Torque teno virus 21, Torque teno virus 22, Torque teno virus 23, Torque teno virus 24, Torque teno virus 25, Torque teno virus 26, Torque teno virus 27, Torque teno virus 28, Torque teno virus 29, Torque teno mini virus 1, Torque teno mini virus 2, Torque teno mini virus 3, Torque teno mini virus 4, Torque teno mini virus 5, Torque teno mini virus 6, Torque teno mini virus 7, Torque teno mini virus 8, Torque teno mini virus 9, Torque teno mini virus 10, Torque teno mini virus 11, Torque teno mini virus 12, Torque teno tupaia virus, Torque teno tamarin virus, Torque teno felis virus, Torque teno felis virus 2, Torque teno midi virus 1, Torque teno midi virus 2, Torque teno midi virus 3, Torque teno midi virus 4, Torque teno midi virus 5, Torque teno midi virus 6, Torque teno midi virus 7, Torque teno midi virus 8, Torque teno midi virus 9, Torque teno midi virus 10, Torque teno midi virus 11, Torque teno midi virus 12, Torque teno midi virus 13, Torque teno midi virus 14, Torque teno midi virus 15, Chicken anemia virus, Torque teno sus virus 1a, Torque teno sus virus 1b, Torque teno sus virus k2a, Torque teno sus virus k2b, Torque teno seal virus 1, Torque teno seal virus 2, Torque teno seal virus 3, Torque teno seal virus 8, Torque teno seal virus 9, Torque teno zalophus virus 1, Torque teno equus virus 1, Torque teno seal virus 4, Torque teno seal virus 5, Torque teno canis virus, Torque teno douroucouli virus, Avocado sunblotch viroid, Eggplant latent viroid, Apple hammerhead viroid, Chrysanthemum chlorotic mottle viroid, Peach latent mosaic viroid, Adoxophyes honmai nucleopolyhedrovirus, Agrotis ipsilon multiple nucleopolyhedrovirus, Agrotis segetum nucleopolyhedrovirus A, Agrotis segetum nucleopolyhedrovirus B, Antheraea pernyi nucleopolyhedrovirus, Anticarsia gemmatalis multiple nucleopolyhedrovirus, Autographa californica multiple nucleopolyhedrovirus, Bombyx mori nucleopolyhedrovirus, Buzura suppressaria nucleopolyhedrovirus, Catopsilia pomona nucleopolyhedrovirus, Choristoneura fumiferana DEF multiple nucleopolyhedrovirus, Choristoneura fumiferana multiple nucleopolyhedrovirus, Choristoneura murinana nucleopolyhedrovirus, Choristoneura rosaceana nucleopolyhedrovirus, Chrysodeixis chalcites nucleopolyhedrovirus, Chrysodeixis includens nucleopolyhedrovirus, Clanis bilineata nucleopolyhedrovirus, Condylorrhiza vestigialis nucleopolyhedrovirus, Cryptophlebia peltastica nucleopolyhedrovirus, Cyclophragma undans nucleopolyhedrovirus, Ectropis obliqua nucleopolyhedrovirus, Epiphyas postvittana nucleopolyhedrovirus, Euproctis pseudoconspersa nucleopolyhedrovirus, Helicoverpa armigera nucleopolyhedrovirus, Hemileuca species nucleopolyhedrovirus, Hyphantria cunea nucleopolyhedrovirus, Hyposidra talaca nucleopolyhedrovirus, Lambdina fiscellaria nucleopolyhedrovirus, Leucania separata nucleopolyhedrovirus, Lonomia obliqua nucleopolyhedrovirus, Lymantria dispar multiple nucleopolyhedrovirus, Lymantria xylina nucleopolyhedrovirus, Mamestra brassicae multiple nucleopolyhedrovirus, Mamestra configurata nucleopolyhedrovirus A, Mamestra configurata nucleopolyhedrovirus B, Maruca vitrata nucleopolyhedrovirus, Mythimna unipuncta nucleopolyhedrovirus A, Mythimna unipuncta nucleopolyhedrovirus B, Operophtera brumata nucleopolyhedrovirus, Orgyia leucostigma nucleopolyhedrovirus, Orgyia pseudotsugata multiple nucleopolyhedrovirus, Oxyplax ochracea nucleopolyhedrovirus, Peridroma saucia nucleopolyhedrovirus, Perigonia lusca nucleopolyhedrovirus, Spodoptera eridania nucleopolyhedrovirus, Spodoptera exempta nucleopolyhedrovirus, Spodoptera exigua multiple nucleopolyhedrovirus, Spodoptera frugiperda multiple nucleopolyhedrovirus, Spodoptera littoralis nucleopolyhedrovirus, Spodoptera litura nucleopolyhedrovirus, Sucra jujuba nucleopolyhedrovirus, Thysanoplusia orichalcea nucleopolyhedrovirus, Trichoplusia ni single nucleopolyhedrovirus, Urbanus proteus nucleopolyhedrovirus, Wiseana signata nucleopolyhedrovirus, Adoxophyes orana granulovirus, Agrotis segetum granulovirus, Artogeia rapae granulovirus, Choristoneura fumiferana granulovirus, Clostera anachoreta granulovirus, Clostera anastomosis granulovirus A, Clostera anastomosis granulovirus B, Cnaphalocrocis medinalis granulovirus, Cryptophlebia leucotreta granulovirus, Cydia pomonella granulovirus, Diatraea saccharalis granulovirus, Epinotia aporema granulovirus, Erinnyis ello granulovirus, Harrisina brillians granulovirus, Helicoverpa armigera granulovirus, Lacanobia oleracea granulovirus, Mocis latipes granulovirus, Mythimna unipuncta granulovirus A, Mythimna unipuncta granulovirus B, Phthorimaea operculella granulovirus, Plodia interpunctella granulovirus, Plutella xylostella granulovirus, Spodoptera frugiperda granulovirus, Spodoptera litura granulovirus, Trichoplusia ni granulovirus, Xestia c-nigrum granulovirus, Culex nigripalpus nucleopolyhedrovirus, Neodiprion lecontei nucleopolyhedrovirus, Neodiprion sertifer nucleopolyhedrovirus, Acidianus two-tailed virus, Aeropyrum pernix bacilliform virus 1, Flavobacterium virus FLiP, Sulfolobus spindle-shaped virus 1, Sulfolobus spindle-shaped virus 2, Sulfolobus spindle-shaped virus 4, Sulfolobus spindle-shaped virus 5, Sulfolobus spindle-shaped virus 7, Sulfolobus spindle-shaped virus 8, Sulfolobus spindle-shaped virus 9, Acidianus spindle-shaped virus 1, Sulfolobus spindle-shaped virus 6, Pyrobaculum spherical virus, Thermoproteus tenax spherical virus 1, Sulfolobus newzealandicus droplet-shaped virus, Aeropyrum pernix ovoid virus 1, Salterprovirus His1, Glossina hytrosavirus, Musca hytrosavirus, White spot syndrome virus, Gryllus bimaculatus nudivirus, Oryctes rhinoceros nudivirus, Heliothis zea nudivirus, Sulfolobus ellipsoid virus 1, Acholeplasma virus L2, Apanteles crassicornis bracovirus, Apanteles fumiferanae bracovirus, Ascogaster argentifrons bracovirus, Ascogaster quadridentata bracovirus, Cardiochiles nigriceps bracovirus, Chelonus altitudinis bracovirus, Chelonus blackburni bracovirus, Chelonus inanitus bracovirus, Chelonus insularis bracovirus, Chelonus near curvimaculatus bracovirus, Chelonus texanus bracovirus, Cotesia congregata bracovirus, Cotesia flavipes bracovirus, Cotesia glomerata bracovirus, Cotesia hyphantriae bracovirus, Cotesia kariyai bracovirus, Cotesia marginiventris bracovirus, Cotesia melanoscela bracovirus, Cotesia rubecula bracovirus, Cotesia schaeferi bracovirus, Diolcogaster facetosa bracovirus, Glyptapanteles flavicoxis bracovirus, Glyptapanteles indiensis bracovirus, Glyptapanteles liparidis bracovirus, Hypomicrogaster canadensis bracovirus, Hypomicrogaster ectdytolophae bracovirus, Microplitis croceipes bracovirus, Microplitis demolitor bracovirus, Phanerotoma flavitestacea bracovirus, Pholetesor ornigis bracovirus, Protapanteles paleacritae bracovirus, Tranosema rostrale bracovirus, Campoletis aprilis ichnovirus, Campoletis flavicincta ichnovirus, Campoletis sonorensis ichnovirus, Casinaria arjuna ichnovirus, Casinaria forcipata ichnovirus, Casinaria infesta ichnovirus, Diadegma acronyctae ichnovirus, Diadegma interruptum ichnovirus, Diadegma terebrans ichnovirus, Enytus montanus ichnovirus, Eriborus terebrans ichnovirus, Glypta fumiferanae ichnovirus, Hyposoter annulipes ichnovirus, Hyposoter exiguae ichnovirus, Hyposoter fugitivus ichnovirus, Hyposoter lymantriae ichnovirus, Hyposoter pilosulus ichnovirus, Hyposoter rivalis ichnovirus, Olesicampe benefactor ichnovirus, Olesicampe geniculatae ichnovirus, Synetaeris tenuifemur ichnovirus, Alphaportoglobovirus SPV2, Sulfolobus alphaportoglobovirus 1, Apple dimple fruit viroid, Apple scar skin viroid, Australian grapevine viroid, Citrus bent leaf viroid, Citrus dwarfing viroid, Citrus viroid V, Citrus viroid VI, Grapevine yellow speckle viroid 1, Grapevine yellow speckle viroid 2, Pear blister canker viroid, Citrus bark cracking viroid, Coconut cadang-cadang viroid, Coconut tinangaja viroid, Hop latent viroid, Coleus blumei viroid 1, Coleus blumei viroid 2, Coleus blumei viroid 3, Dahlia latent viroid, Hop stunt viroid, Chrysanthemum stunt viroid, Citrus exocortis viroid, Columnea latent viroid, Iresine viroid 1, Pepper chat fruit viroid, Potato spindle tuber viroid, Tomato apical stunt viroid, Tomato chlorotic dwarf viroid, Tomato planta macho viroid, Aeropyrum coil-shaped virus, Nitmarvirus NSV1, Ageratum leaf curl Buea betasatellite, Ageratum leaf curl Cameroon betasatellite, Ageratum yellow leaf curl betasatellite, Ageratum yellow vein betasatellite, Ageratum yellow vein India betasatellite, Ageratum yellow vein Sri Lanka betasatellite, Alternanthera yellow vein betasatellite, Andrographis yellow vein leaf curl betasatellite, Bhendi yellow vein mosaic betasatellite, Cardiospermum yellow leaf curl betasatellite, Chili leaf curl betasatellite, Chili leaf curl Jaunpur betasatellite, Chili leaf curl Sri Lanka betasatellite, Cotton leaf curl Gezira betasatellite, Cotton leaf curl Multan betasatellite, Croton yellow vein mosaic betasatellite, Eupatorium yellow vein betasatellite, Eupatorium yellow vein mosaic betasatellite, French bean leaf curl betasatellite, Hedyotis yellow mosaic betasatellite, Honeysuckle yellow vein betasatellite, Honeysuckle yellow vein mosaic betasatellite, Malvastrum leaf curl betasatellite, Malvastrum leaf curl guangdong betasatellite, Mirabilis leaf curl betasatellite, Momordica yellow mosaic betasatellite, Mungbean yellow mosaic betasatellite, Okra leaf curl Oman betasatellite, Papaya leaf curl betasatellite, Papaya leaf curl China betasatellite, Papaya leaf curl India betasatellite, Rhynchosia yellow mosaic betasatellite, Rose leaf curl betasatellite, siegesbeckia yellow vein betasatellite, Tobacco curly shoot betasatellite, Tobacco leaf curl betasatellite, Tobacco leaf curl Japan betasatellite, Tobacco leaf curl Patna betasatellite, Tomato leaf curl Bangalore betasatellite, Tomato leaf curl Bangladesh betasatellite, Tomato leaf curl betasatellite, Tomato leaf curl China betasatellite, Tomato leaf curl Gandhinagar betasatellite, Tomato leaf curl Java betasatellite, Tomato leaf curl Joydebpur betasatellite, Tomato leaf curl Laguna betasatellite, Tomato leaf curl Laos betasatellite, Tomato leaf curl Malaysia betasatellite, Tomato leaf curl Nepal betasatellite, Tomato leaf curl Patna betasatellite, Tomato leaf curl Philippine betasatellite, Tomato leaf curl Sri Lanka betasatellite, Tomato leaf curl Yemen betasatellite, Tomato yellow leaf curl China betasatellite, Tomato yellow leaf curl Rajasthan betasatellite, Tomato yellow leaf curl Shandong betasatellite, Tomato yellow leaf curl Thailand betasatellite, Tomato yellow leaf curl Vietnam betasatellite, Tomato yellow leaf curl Yunnan betasatellite, Vernonia yellow vein betasatellite, Vernonia yellow vein Fujian betasatellite, Croton yellow vein deltasatellite, Malvastrum leaf curl deltasatellite, Sida golden yellow vein deltasatellite 1, Sida golden yellow vein deltasatellite 2, Sida golden yellow vein deltasatellite 3, Sweet potato leaf curl deltasatellite 1, Sweet potato leaf curl deltasatellite 2, Sweet potato leaf curl deltasatellite 3, Tomato leaf curl deltasatellite, Tomato yellow leaf distortion deltasatellite 1, Tomato yellow leaf distortion deltasatellite 2, Pyrobaculum filamentous virus 1, Thermoproteus tenax virus 1, Hepatitis delta virus, Heterocapsa circularisquama DNA virus 01, and Rhizidiomyces virus. Other viruses include the ICTV Master species list (https://talk.ictvonline.org/files/master-species-lists/m/msl/9601), which is incorporated by reference herein.

[0285] In one embodiment, the virus is Ebola, Influenza A, Influenza B, Influenza C, Influenza D, Coronavirus, SARS-CoV, SARS-CoV-2, MERS-CoV, Rotavirus, Marburg virus, Hantavirus, Hepatitus C, Respiratory syncytial virus, Dengue virus, Rabies virus, Zika virus, Measles morbillivirus, west nile virus, vaccinia virus, Norwalk virus, Heptatitus A, Hepatitus D, Borna disease virus, or HIV. In one embodiment, the virus is a coronoavirus. In one embodiment, the virus is SARS-CoV-2. In one embodiment, the virus in an influenza virus. In one embodiment, In one embodiment, the virus in an influenza A virus, an influenza B virus, an influenza C virus, or an influenza D virus.

### Amino Acid and Nucleic Acid Sequences

[0286] Table 1 provides a summary of the amino acid and nucleic acid sequences.

TABLE 1

| SEQ ID NO | Type | Description |
|---|---|---|
| 1 | Amino Acid | PspCas13b |
| 2 | Amino Acid | PspCas13b Truncation |
| 3 | Amino Acid | AspCas13b |
| 4 | Amino Acid | AspCas13c |
| 5 | Amino Acid | BmaCas13a |
| 6 | Amino Acid | BzoCas13b |
| 7 | Amino Acid | CamCas13a |
| 8 | Amino Acid | CcaCas13b |
| 9 | Amino Acid | Cga2Cas13a |
| 10 | Amino Acid | CgaCas13a |
| 11 | Amino Acid | EbaCas13a |
| 12 | Amino Acid | EreCas13a |
| 13 | Amino Acid | EsCas13d |
| 14 | Amino Acid | FbrCas13b |
| 15 | Amino Acid | FnbCas13c |
| 16 | Amino Acid | FndCas13c |
| 17 | Amino Acid | FnfCas13c |
| 18 | Amino Acid | FnsCas13c |
| 19 | Amino Acid | FpeCas13c |
| 20 | Amino Acid | FulCas13c |
| 21 | Amino Acid | HheCas13a |
| 22 | Amino Acid | LbfCas13a |
| 23 | Amino Acid | LbmCas13a |
| 24 | Amino Acid | LbnCas13a |
| 25 | Amino Acid | LbuCas13a |
| 26 | Amino Acid | LseCas13a |
| 27 | Amino Acid | LshCas13a |
| 28 | Amino Acid | LspCas13a |
| 29 | Amino Acid | Lwa2cas13a |
| 30 | Amino Acid | LwaCas13a |
| 31 | Amino Acid | LweCas13a |
| 32 | Amino Acid | PauCas13b |
| 33 | Amino Acid | PbuCas13b |
| 34 | Amino Acid | PgiCas13b |
| 35 | Amino Acid | PguCas13b |
| 36 | Amino Acid | Pin2Cas13b |
| 37 | Amino Acid | Pin3Cas13b |
| 38 | Amino Acid | PinCas13b |
| 39 | Amino Acid | Pprcas13a |
| 40 | Amino Acid | PsaCas13b |
| 41 | Amino Acid | PsmCas13b |
| 42 | Amino Acid | RanCas13b |
| 43 | Amino Acid | RcdCas13a |
| 44 | Amino Acid | RcrCas13a |
| 45 | Amino Acid | RcsCas13a |
| 46 | Amino Acid | UrCas13d |
| 47 | Amino Acid | RfxCas13d |
| 48 | Amino Acid | dPspCas13b |
| 49 | Amino Acid | dPspCas13b truncation |
| 50 | Amino Acid | Ty1 NLS |
| 51 | Amino Acid | Ty2 NLS |
| 52 | Amino Acid | MAK11 |
| 53 | Amino Acid | 1xSV40 |
| 54 | Amino Acid | 3xSV40 |
| 55 | Amino Acid | NPM |
| 56 | Amino Acid | STH1 |
| 57 | Amino Acid | INO4 |
| 58 | Amino Acid | Nuclear Export Signal (NES) |
| 59 | Amino Acid | Nuclear Export Signal (NES) |
| 60 | Amino Acid | N-terminal 1x Mitochondrial Targeting Sequence |
| 61 | Amino Acid | N-terminal 4x Mitochondrial Targeting Sequence |
| 62 | Amino Acid | N-terminal Secretory Signal Sequence (IL-2) |
| 63 | Amino Acid | N-terminal Myristoylation (Membrane Targeting Sequence) |
| 64 | Amino Acid | ER Localization - N-terminal Calsequestrin leader sequence |
| 65 | Amino Acid | ER Localization - C-terminal KDEL retention signal |
| 66 | Amino Acid | C-terminal Peroxisome Targeting Sequence |
| 67 | Amino Acid | 3xFlag |
| 68 | Amino Acid | EraseR |
| 69 | Amino Acid | EraseR (Ty2) |
| 70 | Amino Acid | EraseR (NES) |
| 71 | Amino Acid | EraseR (NES) |
| 72 | Amino Acid | EraseR (N-terminal 1x Mitochondrial Targeting Sequence) |
| 73 | Amino Acid | EraseR (N-terminal 4x Mitochondrial Targeting Sequence) |
| 74 | Amino Acid | EraseR (N-terminal Secretory Signal Sequence (IL-2)) |
| 75 | Amino Acid | EraseR (N-terminal Myristoylation (Membrane Targeting Sequence)) |
| 76 | Amino Acid | EraseR (ER Localization - N-terminal Calsequestrin leader sequence) |
| 77 | Amino Acid | EraseR (ER Localization - C-terminal KDEL retention signal) |
| 78 | Amino Acid | EraseR (C-terminal Peroxisome Targeting Sequence) |
| 79 | Amino Acid | EraseR - Short |
| 80 | Amino Acid | EraseR (Ty2) - Short |
| 81 | Amino Acid | EraseR (NES) - Short |
| 82 | Amino Acid | EraseR (NES) - Short |
| 83 | Amino Acid | EraseR (N-terminal 1x Mitochondrial Targeting Sequence) - Short |
| 84 | Amino Acid | EraseR (N-terminal 4x Mitochondrial Targeting Sequence) - Short |
| 85 | Amino Acid | EraseR (N-terminal Secretory Signal Sequence (IL-2)) - Short |
| 86 | Amino Acid | EraseR (N-terminal Myristoylation (Membrane Targeting Sequence)) - Short |
| 87 | Amino Acid | EraseR (ER Localization - N-terminal Calsequestrin leader sequence) - Short |
| 88 | Amino Acid | EraseR (ER Localization - C-terminal KDEL retention signal) - Short |
| 89 | Amino Acid | EraseR (C-terminal Peroxisome Targeting Sequence) - Short |
| 90 | Amino Acid | RfxCas13d Eraser (Ty1) |
| 91 | Amino Acid | RfxCas13d EraseR (Ty2) |
| 92 | Amino Acid | RfxCas13d EraseR (NES) |
| 93 | Amino Acid | RfxCas13d EraseR (NES) |
| 94 | Amino Acid | RfxCas13d EraseR (N-terminal 1x Mitochondrial Targeting Sequence) |
| 95 | Amino Acid | RfxCas13d EraseR (N-terminal 4x Mitochondrial Targeting Sequence) |
| 96 | Amino Acid | RfxCas13d EraseR (N-terminal Secretory Signal Sequence (IL-2)) |
| 97 | Amino Acid | RfxCas13d EraseR (N-terminal Myristoylation (Membrane Targeting |
| | | Sequence)) |
| 98 | Amino Acid | RfxCas13d EraseR (ER Localization - N-terminal Calsequestrin leader |
| | | sequence) |
| 99 | Amino Acid | RfxCas13d EraseR (ER Localization - C-terminal KDEL retention signal) |
| 100 | Amino Acid | RfxCas13d EraseR (C-terminal Peroxisome Targeting Sequence) |
| 101 | Amino Acid | SARS-COV-2 Spike Protein Wild Type sequence |
| 102 | Amino Acid | SARS-COV-2 Spike Protein with C-terminal 27 aa deletion) |
| 103 | Amino Acid | SARS-COV-2 Spike Protein with HIV envelope membrane proximal sequence |
| | | (S-H2) |
| 104 | Amino Acid | SARS-COV-2 Spike Protein with VSV-G envelope protein cytoplasmic tail |
| | | sequence |
| 105 | Amino Acid | SARS-COV-2 Spike Protein with HIV envelope protein cytoplasmic tail |
| 106 | Amino Acid | SARS-COV-2 Spike Protein with HIV transmembrane and cytoplasmic tail |
| 107 | Amino Acid | SARS-COV-2 Spike Protein with VSV-G transmembrane and cytoplasmic tail |
| | | sequence |
| 108 | Amino Acid | SARS-COV-1 Spike Protein (WT) |
| 109 | Amino Acid | SARS-COV-1 Spike Protein N-term SP(CD5) and C-term truncation (aka |
| | | SARS-COV-1 4LV) |
| 110 | Amino Acid | SARS-COV-1 Spike Protein N-term SP(CD5) and VSV-G transmembrane and |
| | | cytoplasmic tail |
| 111 | Amino Acid | SARS-COV-2 Spike Protein N-term SP(CD5) and C-term truncation (aka |
| | | SARS-COV-2 4LV) |
| 112 | Amino Acid | SARS-COV-2 Spike Protein N-term SP(CD5) and VSV-G transmembrane and |
| | | cytoplasmic tail |
| 113 | Amino Acid | SARS-COV-2 Spike Protein [N501Y] |
| 114 | Amino Acid | SARS-COV-2 Spike Protein N-term SP(CD5) and C-term truncation (aka |
| | | SARS-COV-2 4LV) [N501Y] |
| 115 | Amino Acid | SARS-COV-2 Spike Protein [D614G] |
| 116 | Amino Acid | SARS-COV-2 Spike Protein N-term SP(CD5) and C-term truncation (aka |
| | | SARS-COV-2 4LV) [D614G] |
| 117 | Amino Acid | SARS-COV-2 Spike Protein [L452R] |
| 118 | Amino Acid | SARS-COV-2 Spike Protein N-term SP(CD5) and C-term truncation (aka |
| | | SARS-COV-2 4LV) [L452R] |
| 119 | Amino Acid | SARS-COV-2 Spike Protein [E484K] |
| 120 | Amino Acid | SARS-COV-2 Spike Protein N-term SP(CD5) and C-term truncation (aka |
| | | SARS-COV-2 4LV) [E484K] |
| 121 | Amino Acid | SARS-COV-2 Spike Protein [N501Y; E484K] |
| 122 | Amino Acid | SARS-COV-2 Spike Protein N-term SP(CD5) and C-term truncation (aka |
| | | SARS-COV-2 4LV) [N501Y; E484K] |
| 123 | Amino Acid | SARS-COV-2 Spike Protein [P.1 lineage variant: K417N; E484K; N501Y] |
| 124 | Amino Acid | SARS-COV-2 Spike Protein N-term SP(CD5) and C-term truncation (aka |
| | | SARS-COV-2 4LV) [P.1 lineage variant: K417N; E484K; N501Y] |
| 125 | Amino Acid | SARS-COV-2 Spike Protein [B.1.351 variant: K417N; E484K; N501Y; |
| | | D614G] |
| 126 | Amino Acid | SARS-COV-2 Spike Protein N-term SP(CD5) and C-term truncation (aka |
| | | SARS-COV-2 4LV) [B.1.351 variant: K417N; E484K; N501Y; D614G] |
| 127 | Amino Acid | SARS-COV-2 Spike Protein N-term SP(CD5) and C-term truncation (aka |
| | | SARS-COV-2 4LV) with GCN4 Trimerization domain |
| 128 | Amino Acid | SARS-COV-2 Spike Protein N-term SP(CD5) and C-term truncation (aka |
| | | SARS-COV-2 4LV) with T4 Foldon Trimerization domain |
| 129 | Amino Acid | SARS-COV-2 Spike Protein N-term SP(CD5) and C-term truncation (aka |
| | | SARS-COV-2 4LV) with mimimal T4 Foldon Trimerization domain |
| 130 | Amino Acid | VSV-G envelope protein for broad cell type transduction |
| 131 | Amino Acid | High Sensitivity Luciferase Expression Cassette Contains protein degradation |
| | | sequence (hCl1-pest fusion) at C-terminus |
| 132 | Nucleic Acid | PspCas13b |
| 133 | Nucleic Acid | PspCas13b Truncation |
| 134 | Nucleic Acid | dPspCas13b |
| 135 | Nucleic Acid | dPspCas13b truncation |
| 136 | Nucleic Acid | Ty1 NLS |
| 137 | Nucleic Acid | NES |
| 138 | Nucleic Acid | Nuclear Export Signal (NES) |
| 139 | Nucleic Acid | N-terminal 1x Mitochondrial Targeting Sequence |
| 140 | Nucleic Acid | N-terminal 4x Mitochondrial Targeting Sequence |
| 141 | Nucleic Acid | N-terminal Secretory Signal Sequence (IL-2) |
| 142 | Nucleic Acid | N-terminal Myristoylation (Membrane Targeting Sequence) |
| 143 | Nucleic Acid | ER Localization - N-terminal Calsequestrin leader sequence |
| 144 | Nucleic Acid | ER Localization - C-terminal KDEL retention signal |
| 145 | Nucleic Acid | C-terminal Peroxisome Targeting Sequence |
| 146 | Nucleic Acid | 3xFlag |
| 147 | Nucleic Acid | EraseR (Ty1) |
| 148 | Nucleic Acid | EraseR (NES) |
| 149 | Nucleic Acid | EraseR (NES) |
| 150 | Nucleic Acid | EraseR (N-terminal 1x Mitochondrial Targeting Sequence) |
| 151 | Nucleic Acid | EraseR (N-terminal 4x Mitochondrial Targeting Sequence) |
| 152 | Nucleic Acid | EraseR (N-terminal Secretory Signal Sequence (IL-2)) |
| 153 | Nucleic Acid | EraseR (N-terminal Myristoylation (Membrane Targeting Sequence)) |
| 154 | Nucleic Acid | EraseR (ER Localization - N-terminal Calsequestrin leader sequence) |
| 155 | Nucleic Acid | EraseR (ER Localization - C-terminal KDEL retention signal) |
| 156 | Nucleic Acid | EraseR (C-terminal Peroxisome Targeting Sequence) |
| 157 | Nucleic Acid | EraseR (Ty1) - short |
| 158 | Nucleic Acid | EraseR (NES) - short |
| 159 | Nucleic Acid | EraseR (NES) - short |
| 160 | Nucleic Acid | EraseR (N-terminal 1x Mitochondrial Targeting Sequence) - short |
| 161 | Nucleic Acid | EraseR (N-terminal 4x Mitochondrial Targeting Sequence) - short |
| 162 | Nucleic Acid | EraseR (N-terminal Secretory Signal Sequence (IL-2) - short |
| 163 | Nucleic Acid | EraseR (N-terminal Myristoylation (Membrane Targeting Sequence) - short |
| 164 | Nucleic Acid | EraseR (ER Localization - N-terminal Calsequestrin leader sequence) - short |
| 165 | Nucleic Acid | EraseR (ER Localization - C-terminal KDEL retention signal) - short |
| 166 | Nucleic Acid | EraseR (C-terminal Peroxisome Targeting Sequence) - short |
| 167 | Nucleic Acid | SARS-COV-2 Leader Sequence |
| 168 | Nucleic Acid | SARS-COV-2 Leader crRNA Target A |
| 169 | Nucleic Acid | SARS-COV-2 Leader crRNA Target B |
| 170 | Nucleic Acid | SARS-COV-2 Leader crRNA Target C |
| 171 | Nucleic Acid | SARS-COV-2 Leader crRNA Target D |
| 172 | Nucleic Acid | SARS-COV-2 Leader crRNA Target E |
| 173 | Nucleic Acid | SARS-COV-2 Leader crRNA Target F |
| 174 | Nucleic Acid | SARS-COV-2 Leader crRNA Target G |
| 175 | Nucleic Acid | SARS-2-CoV S2M sequence |
| 176 | Nucleic Acid | SARS-2-CoV S2M crRNA Target A |
| 177 | Nucleic Acid | SARS-2-CoV S2M crRNA Target B |
| 178 | Nucleic Acid | SARS-2-CoV S2M crRNA Target C |
| 179 | Nucleic Acid | SARS-2-CoV S2M crRNA Target D |
| 180 | Nucleic Acid | SARS-2-CoV S2M crRNA Target E |
| 181 | Nucleic Acid | SARS-2-CoV S2M crRNA Target F |
| 182 | Nucleic Acid | Bovine Coronavirus Leader Sequence |
| 183 | Nucleic Acid | SARS-COV-2 3′ Stem-loop II-like (S2M) Sequence |
| 184 | Nucleic Acid | SARS-COV-2 Nucleocapsid (N) Site A |
| 185 | Nucleic Acid | SARS-COV-2 Nucleocapsid (N) Site B |
| 186 | Nucleic Acid | SARS-COV-2 Nucleocapsid (N) Site A Target |
| 187 | Nucleic Acid | SARS-COV-2 Nucleocapsid (N) Site B Target |
| 188 | Nucleic Acid | SARS-COV-2 Leader Sequence |
| 189 | Nucleic Acid | SARS-COV-2 Leader crRNA A |
| 190 | Nucleic Acid | SARS-COV-2 Leader crRNA B |
| 191 | Nucleic Acid | SARS-COV-2 Leader crRNA C |
| 192 | Nucleic Acid | SARS-COV-2 Leader crRNA D |
| 193 | Nucleic Acid | SARS-COV-2 Leader crRNA E |
| 194 | Nucleic Acid | SARS-COV-2 Leader crRNA F |
| 195 | Nucleic Acid | SARS-COV-2 Leader crRNA G |
| 196 | Nucleic Acid | SARS-COV-2 S2M crRNA A |
| 197 | Nucleic Acid | SARS-COV-2 S2M crRNA B |
| 198 | Nucleic Acid | SARS-COV-2 S2M crRNA C |
| 199 | Nucleic Acid | SARS-COV-2 S2M crRNA D |
| 200 | Nucleic Acid | SARS-COV-2 S2M crRNA E |
| 201 | Nucleic Acid | SARS-COV-2 S2M crRNA F |
| 202 | Nucleic Acid | SARS-COV-2 Leader crRNA A |
| 203 | Nucleic Acid | SARS-COV-2 Leader crRNA B |
| 204 | Nucleic Acid | SARS-COV-2 Leader crRNA C |
| 205 | Nucleic Acid | SARS-COV-2 Leader crRNA D |
| 206 | Nucleic Acid | SARS-COV-2 Leader crRNA E |
| 207 | Nucleic Acid | SARS-COV-2 Leader crRNA F |
| 208 | Nucleic Acid | SARS-COV-2 Leader crRNA G |
| 209 | Nucleic Acid | BCV Leader crRNA A |
| 210 | Nucleic Acid | BCV Leader crRNA B |
| 211 | Nucleic Acid | BCV Leader crRNA C |
| 212 | Nucleic Acid | BCV Leader crRNA D |
| 213 | Nucleic Acid | BCV Leader crRNA E |
| 214 | Nucleic Acid | BCV Leader crRNA F |
| 215 | Nucleic Acid | BCV Leader crRNA G |
| 216 | Nucleic Acid | SARS-COV-2 S2M crRNA A |
| 217 | Nucleic Acid | SARS-COV-2 S2M crRNA B |
| 218 | Nucleic Acid | SARS-COV-2 S2M crRNA C |
| 219 | Nucleic Acid | SARS-COV-2 S2M crRNA D |
| 220 | Nucleic Acid | SARS-COV-2 S2M crRNA E |
| 221 | Nucleic Acid | SARS-COV-2 S2M crRNA F |
| 222 | Nucleic Acid | SARS-COV-2 S2M crRNA G |
| 223 | Nucleic Acid | SARS-COV-2 N crRNA A |
| 224 | Nucleic Acid | SARS-COV-2 N crRNA B |
| 225 | Nucleic Acid | H1N1 Segment 1 crRNA target |
| 226 | Nucleic Acid | H3N2 Segment 1 crRNA target |
| 227 | Nucleic Acid | H7N9 Segment 1 crRNA target |
| 228 | Nucleic Acid | H2N2 Segment 1 crRNA target |
| 229 | Nucleic Acid | H1N1 Segment 2 crRNA target |
| 230 | Nucleic Acid | H3N2 Segment 2 crRNA target |
| 231 | Nucleic Acid | H7N9 Segment 2 crRNA target |
| 232 | Nucleic Acid | H2N2 Segment 2 crRNA target |
| 233 | Nucleic Acid | H1N1 Segment 3 crRNA target |
| 234 | Nucleic Acid | H3N2 Segment 3 crRNA target |
| 235 | Nucleic Acid | H7N9 Segment 3 crRNA target |
| 236 | Nucleic Acid | H2N2 Segment 3 crRNA target |
| 237 | Nucleic Acid | H1N1 Segment 5 crRNA target |
| 238 | Nucleic Acid | H3N2 Segment 5 crRNA target |
| 239 | Nucleic Acid | H7N9 Segment 5 crRNA target |
| 240 | Nucleic Acid | H2N2 Segment 5 crRNA target |
| 241 | Nucleic Acid | H1N1 Segment 7 crRNA target |
| 242 | Nucleic Acid | H3N2 Segment 7 crRNA target |
| 243 | Nucleic Acid | H7N9 Segment 7 crRNA target |
| 244 | Nucleic Acid | H2N2 Segment 7 crRNA target |
| 245 | Nucleic Acid | Flu + sense vRNA Segment 1 crRNA |
| 246 | Nucleic Acid | Flu + sense vRNA Segment 2 crRNA |
| 247 | Nucleic Acid | Flu + sense vRNA Segment 3 crRNA |
| 248 | Nucleic Acid | Flu + sense vRNA Segment 5 crRNA |
| 249 | Nucleic Acid | Flu + sense vRNA Segment 7 crRNA |
| 250 | Nucleic Acid | Flu (−) sense vRNA Segment 1 crRNA |
| 251 | Nucleic Acid | Flu (−) sense vRNA Segment 2 crRNA |
| 252 | Nucleic Acid | Flu (−) sense vRNA Segment 3 crRNA |
| 253 | Nucleic Acid | Flu (−) sense vRNA Segment 5 crRNA |
| 254 | Nucleic Acid | Flu (−) sense vRNA Segment 7 crRNA |
| 255 | Nucleic Acid | Cas13d (+) sense targeting highly conserved Influenza A Seg 1 crRNA |
| 256 | Nucleic Acid | Cas13d (+) sense targeting highly conserved Influenza A Seg 2 crRNA |
| 257 | Nucleic Acid | Cas13d (+) sense targeting highly conserved Influenza A Seg 3 crRNA |
| 258 | Nucleic Acid | Cas13d (+) sense targeting highly conserved Influenza A Seg 5 crRNA |
| 259 | Nucleic Acid | Cas13d (+) sense targeting highly conserved Influenza A Seg 7 crRNA |
| 260 | Nucleic Acid | Cas13d (−) sense targeting highly conserved Influenza A Seg 1 crRNA |
| 261 | Nucleic Acid | Cas13d (−) sense targeting highly conserved Influenza A Seg 2 crRNA |
| 262 | Nucleic Acid | Cas13d (−) sense targeting highly conserved Influenza A Seg 3 crRNA |
| 263 | Nucleic Acid | Cas13d (−) sense targeting highly conserved Influenza A Seg 5 crRNA |
| 264 | Nucleic Acid | Cas13d (−) sense targeting highly conserved Influenza A Seg 7 crRNA |
| 265 | Nucleic Acid | BzoCas13b crRNA direct repeat sequence |
| 266 | Nucleic Acid | PbTCas13b crRNA direct repeat sequence |
| 267 | Nucleic Acid | PspCas13b crRNA direct repeat sequence |
| 268 | Nucleic Acid | PspCas13b crRNA direct repeat sequence T17C |
| 269 | Nucleic Acid | PspCas13b crRNA direct repeat sequence T17A |
| 270 | Nucleic Acid | PspCas13b crRNA direct repeat sequence T17G |
| 271 | Nucleic Acid | PspCas13b crRNA direct repeat sequence T18C |
| 272 | Nucleic Acid | PspCas13b crRNA direct repeat sequence T18A |
| 273 | Nucleic Acid | PspCas13b crRNA direct repeat sequence T18G |
| 274 | Nucleic Acid | PspCas13b crRNA direct repeat sequence T19C |
| 275 | Nucleic Acid | LDR-D/N-B/S2M-D crRNA array with DR loop mutations |
| 276 | Nucleic Acid | Positive-sense Five-crRNA Array sequence (Segment order 1-2-3-5-7) |
| 277 | Nucleic Acid | Negative-sense Five-crRNA Array sequence (Segment order: 2-1-3-5-7) |
| 278 | Nucleic Acid | Cas13d (+) sense Seg 1, 2, 3, 5, 7 crRNA array |
| 279 | Nucleic Acid | Cas13d (−) sense Seg 1, 2, 3, 5, 7 crRNA array |
| 280 | Nucleic Acid | Lentiviral Transfer Plasmid encoding Cytoplasmic PspCas13b and crRNA |
| | | (hU6-crRNA cassette-EF1a core promoter-3xFlag-NES-PspCas13b-WPRE) |
| 281 | Nucleic Acid | Lentiviral Transfer Plasmid encoding Nuclear PspCas13b and crRNA (hU6- |
| | | crRNA cassette-EF1a core promoter-3xFlag-TY1NLS-PspCas13b-WPRE) |
| 282 | Nucleic Acid | Single guide Lentiviral Gene Transfer Vector (LDR-D) 5′LTR-hU6-crRNA- |
| | | CBH-3xFLAG-NES-PspCas13b-WPRE-3′SINLTR |
| 283 | Nucleic Acid | Triple Guide Lentiviral Gene Transfer Vector (LDR-D, N-B, S2M-D) 5′LTR- |
| | | hU6-crRNAarray-CBH-3xFLAG-NES-PspCas13b-WPRE-3′SINLTR |
| 284 | Nucleic Acid | Triple Guide AAV Viral Vector (LDR-D, N-B, S2M-D) |
| 285 | Nucleic Acid | Luciferase Expression Cassette (SV40-5′UTR-Luc coding sequence-3′UTR- |
| | | SV40 poly(A)) |
| 286 | Nucleic Acid | Enhanced Luciferase Expression Cassette (SV40 Promoter-5′UTR-Luciferase |
| | | coding sequence-3′UTR-SV40 poly(A)-SV40 Enhancer) |
| 287 | Nucleic Acid | SV40 Promoter-5′UTR-Luciferase coding sequence-hCl1-PestUTR-SV40 |
| | | poly(A)-SV40 Enhancer |
| 288 | Nucleic Acid | LUC (+) sense Seg 1 |
| 289 | Nucleic Acid | LUC (+) sense Seg 2 |
| 290 | Nucleic Acid | LUC (+) sense Seg 3 |
| 291 | Nucleic Acid | LUC (+) sense Seg 5 |
| 292 | Nucleic Acid | LUC (+) sense Seg 7 |
| 293 | Nucleic Acid | LUC (−) sense Seg 1 |
| 294 | Nucleic Acid | LUC (−) sense Seg 2 |
| 295 | Nucleic Acid | LUC (−) sense Seg 3 |
| 296 | Nucleic Acid | LUC (−) sense Seg 5 |
| 297 | Nucleic Acid | LUC (−) sense Seg 7 |
| 298 | Amino Acid | Ty1-like NLS O28090-0 |
| 299 | Amino Acid | Ty1-like NLS O50087-0 |
| 300 | Amino Acid | Ty1-like NLS O58353-0 |
| 301 | Amino Acid | Ty1-like NLS Q57602-0 |
| 302 | Amino Acid | Ty1-like NLS Q6L1X9-0 |
| 303 | Amino Acid | Ty1-like NLS A0K3M1-0 |
| 304 | Amino Acid | Ty1-like NLS A0LYZ1-0 |
| 305 | Amino Acid | Ty1-like NLS A1B022-0 |
| 306 | Amino Acid | Ty1-like NLS A1V8A7-0 |
| 307 | Amino Acid | Ty1-like NLS A1VIP6-0 |
| 308 | Amino Acid | Ty1-like NLS A2RDW6-0 |
| 309 | Amino Acid | Ty1-like NLS A2S7H2-0 |
| 310 | Amino Acid | Ty1-like NLS A3MRV0-0 |
| 311 | Amino Acid | Ty1-like NLS A3NEI3-0 |
| 312 | Amino Acid | Ty1-like NLS A3P0B7-0 |
| 313 | Amino Acid | Ty1-like NLS A4JAN6-0 |
| 314 | Amino Acid | Ty1-like NLS A4SUV7-0 |
| 315 | Amino Acid | Ty1-like NLS A5FP03-0 |
| 316 | Amino Acid | Ty1-like NLS A5ILZ2-0 |
| 317 | Amino Acid | Ty1-like NLS A6GY20-0 |
| 318 | Amino Acid | Ty1-like NLS A6LLI5-0 |
| 319 | Amino Acid | Ty1-like NLS A6LQX4-0 |
| 320 | Amino Acid | Ty1-like NLS A8F6X2-0 |
| 321 | Amino Acid | Ty1-like NLS A8G6B7-0 |
| 322 | Amino Acid | Ty1-like NLS A9ADI9-0 |
| 323 | Amino Acid | Ty1-like NLS A9IJ08-0 |
| 324 | Amino Acid | Ty1-like NLS A9IXA1-0 |
| 325 | Amino Acid | Ty1-like NLS A9NEN2-0 |
| 326 | Amino Acid | Ty1-like NLS B0S140-0 |
| 327 | Amino Acid | Ty1-like NLS B1JU18-0 |
| 328 | Amino Acid | Ty1-like NLS B1LBA1-0 |
| 329 | Amino Acid | Ty1-like NLS B1W354-0 |
| 330 | Amino Acid | Ty1-like NLS B1XSP7-0 |
| 331 | Amino Acid | Ty1-like NLS B1YRC6-0 |
| 332 | Amino Acid | Ty1-like NLS B2JIH0-0 |
| 333 | Amino Acid | Ty1-like NLS B2T755-0 |
| 334 | Amino Acid | Ty1-like NLS B2UEM3-0 |
| 335 | Amino Acid | Ty1-like NLS B3PLU0-0 |
| 336 | Amino Acid | Ty1-like NLS B3R7T2-0 |
| 337 | Amino Acid | Ty1-like NLS B4E5B6-0 |
| 338 | Amino Acid | Ty1-like NLS B4S3C9-0 |
| 339 | Amino Acid | Ty1-like NLS B7IHT4-0 |
| 340 | Amino Acid | Ty1-like NLS B8E0X6-0 |
| 341 | Amino Acid | Ty1-like NLS B9K7W0-0 |
| 342 | Amino Acid | Ty1-like NLS C1A494-0 |
| 343 | Amino Acid | Ty1-like NLS C5CE41-0 |
| 344 | Amino Acid | Ty1-like NLS O88058-0 |
| 345 | Amino Acid | Ty1-like NLS P0DG92-0 |
| 346 | Amino Acid | Ty1-like NLS P0DG93-0 |
| 347 | Amino Acid | Ty1-like NLS P60554-0 |
| 348 | Amino Acid | Ty1-like NLS P67354-0 |
| 349 | Amino Acid | Ty1-like NLS P75311-0 |
| 350 | Amino Acid | Ty1-like NLS P75471-0 |
| 351 | Amino Acid | Ty1-like NLS P94372-0 |
| 352 | Amino Acid | Ty1-like NLS Q056Y0-0 |
| 353 | Amino Acid | Ty1-like NLS Q057D7-0 |
| 354 | Amino Acid | Ty1-like NLS Q0AYB7-0 |
| 355 | Amino Acid | Ty1-like NLS Q0BJ50-0 |
| 356 | Amino Acid | Ty1-like NLS Q0K610-0 |
| 357 | Amino Acid | Ty1-like NLS Q0STA4-0 |
| 358 | Amino Acid | Ty1-like NLS Q0STL9-0 |
| 359 | Amino Acid | Ty1-like NLS Q0TQV7-0 |
| 360 | Amino Acid | Ty1-like NLS Q0TR88-0 |
| 361 | Amino Acid | Ty1-like NLS Q12GX5-0 |
| 362 | Amino Acid | Ty1-like NLS Q13TG6-0 |
| 363 | Amino Acid | Ty1-like NLS Q1AWG1-0 |
| 364 | Amino Acid | Ty1-like NLS Q1BRU4-0 |
| 365 | Amino Acid | Ty1-like NLS Q1J5X5-0 |
| 366 | Amino Acid | Ty1-like NLS Q1JAY8-0 |
| 367 | Amino Acid | Ty1-like NLS Q1JG57-0 |
| 368 | Amino Acid | Ty1-like NLS Q1JL34-0 |
| 369 | Amino Acid | Ty1-like NLS Q1LI28-0 |
| 370 | Amino Acid | Ty1-like NLS Q2L2H3-0 |
| 371 | Amino Acid | Ty1-like NLS Q2NIH1-0 |
| 372 | Amino Acid | Ty1-like NLS Q2SU23-0 |
| 373 | Amino Acid | Ty1-like NLS Q39KH1-0 |
| 374 | Amino Acid | Ty1-like NLS Q3JMQ8-0 |
| 375 | Amino Acid | Ty1-like NLS Q3YRL8-0 |
| 376 | Amino Acid | Ty1-like NLS Q46WD9-0 |
| 377 | Amino Acid | Ty1-like NLS Q48SQ4-0 |
| 378 | Amino Acid | Ty1-like NLS Q49418-0 |
| 379 | Amino Acid | Ty1-like NLS Q56307-0 |
| 380 | Amino Acid | Ty1-like NLS Q5LEQ4-0 |
| 381 | Amino Acid | Ty1-like NLS Q5WEJ7-0 |
| 382 | Amino Acid | Ty1-like NLS Q5XBA0-0 |
| 383 | Amino Acid | Ty1-like NLS Q62GK1-0 |
| 384 | Amino Acid | Ty1-like NLS Q63Q07-0 |
| 385 | Amino Acid | Ty1-like NLS Q64VP0-0 |
| 386 | Amino Acid | Ty1-like NLS Q6G3V1-0 |
| 387 | Amino Acid | Ty1-like NLS Q6G5M0-0 |
| 388 | Amino Acid | Ty1-like NLS Q6LLQ8-0 |
| 389 | Amino Acid | Ty1-like NLS Q6MDC1-0 |
| 390 | Amino Acid | Ty1-like NLS Q6MDH4-0 |
| 391 | Amino Acid | Ty1-like NLS Q6ME08-0 |
| 392 | Amino Acid | Ty1-like NLS Q73PH4-0 |
| 393 | Amino Acid | Ty1-like NLS Q7MAD1-0 |
| 394 | Amino Acid | Ty1-like NLS Q7UP72-0 |
| 395 | Amino Acid | Ty1-like NLS Q7VTD6-0 |
| 396 | Amino Acid | Ty1-like NLS Q7W2F9-0 |
| 397 | Amino Acid | Ty1-like NLS Q7WRC8-0 |
| 398 | Amino Acid | Ty1-like NLS Q828D0-0 |
| 399 | Amino Acid | Ty1-like NLS Q895M9-0 |
| 400 | Amino Acid | Ty1-like NLS Q8AAP0-0 |
| 401 | Amino Acid | Ty1-like NLS Q8D1X2-0 |
| 402 | Amino Acid | Ty1-like NLS Q8K908-0 |
| 403 | Amino Acid | Ty1-like NLS Q8P0C9-0 |
| 404 | Amino Acid | Ty1-like NLS Q8XKR1-0 |
| 405 | Amino Acid | Ty1-like NLS Q8XL46-0 |
| 406 | Amino Acid | Ty1-like NLS Q8XV09-0 |
| 407 | Amino Acid | Ty1-like NLS Q93Q47-0 |
| 408 | Amino Acid | Ty1-like NLS Q9L0Q6-0 |
| 409 | Amino Acid | Ty1-like NLS Q9L0Q6-1 |
| 410 | Amino Acid | Ty1-like NLS Q9L0Q6-2 |
| 411 | Amino Acid | Ty1-like NLS Q9L0Q6-3 |
| 412 | Amino Acid | Ty1-like NLS Q9L0Q6-4 |
| 413 | Amino Acid | Ty1-like NLS Q9L0Q6-5 |
| 414 | Amino Acid | Ty1-like NLS Q9L0Q6-6 |
| 415 | Amino Acid | Ty1-like NLS Q9X1S8-0 |
| 416 | Amino Acid | Ty1-like NLS A1CNV8-0 |
| 417 | Amino Acid | Ty1-like NLS A1D1R8-0 |
| 418 | Amino Acid | Ty1-like NLS A1D731-0 |
| 419 | Amino Acid | Ty1-like NLS A2QAX7-0 |
| 420 | Amino Acid | Ty1-like NLS A3LQ55-0 |
| 421 | Amino Acid | Ty1-like NLS A5DGY0-0 |
| 422 | Amino Acid | Ty1-like NLS A5DKW3-0 |
| 423 | Amino Acid | Ty1-like NLS A5DLG8-0 |
| 424 | Amino Acid | Ty1-like NLS A5DY34-0 |
| 425 | Amino Acid | Ty1-like NLS A6RBB0-0 |
| 426 | Amino Acid | Ty1-like NLS A6RMZ2-0 |
| 427 | Amino Acid | Ty1-like NLS A6ZL85-0 |
| 428 | Amino Acid | Ty1-like NLS A6ZZJ1-0 |
| 429 | Amino Acid | Ty1-like NLS A7E4K0-0 |
| 430 | Amino Acid | Ty1-like NLS G0S8I1-0 |
| 431 | Amino Acid | Ty1-like NLS O13527-0 |
| 432 | Amino Acid | Ty1-like NLS O13535-0 |
| 433 | Amino Acid | Ty1-like NLS O13658-0 |
| 434 | Amino Acid | Ty1-like NLS O14064-0 |
| 435 | Amino Acid | Ty1-like NLS O14076-0 |
| 436 | Amino Acid | Ty1-like NLS O42668-0 |
| 437 | Amino Acid | Ty1-like NLS O43068-0 |
| 438 | Amino Acid | Ty1-like NLS O74777-0 |
| 439 | Amino Acid | Ty1-like NLS O74862-0 |
| 440 | Amino Acid | Ty1-like NLS O94383-0 |
| 441 | Amino Acid | Ty1-like NLS O94487-0 |
| 442 | Amino Acid | Ty1-like NLS O94585-0 |
| 443 | Amino Acid | Ty1-like NLS O94652-0 |
| 444 | Amino Acid | Ty1-like NLS P0C2I2-0 |
| 445 | Amino Acid | Ty1-like NLS P0C2I3-0 |
| 446 | Amino Acid | Ty1-like NLS P0C2I5-0 |
| 447 | Amino Acid | Ty1-like NLS P0C2I6-0 |
| 448 | Amino Acid | Ty1-like NLS P0C2I7-0 |
| 449 | Amino Acid | Ty1-like NLS P0C2I9-0 |
| 450 | Amino Acid | Ty1-like NLS P0C2J0-0 |
| 451 | Amino Acid | Ty1-like NLS P0C2J1-0 |
| 452 | Amino Acid | Ty1-like NLS P0C2J3-0 |
| 453 | Amino Acid | Ty1-like NLS P0C2J5-0 |
| 454 | Amino Acid | Ty1-like NLS P0CM98-0 |
| 455 | Amino Acid | Ty1-like NLS P0CM99-0 |
| 456 | Amino Acid | Ty1-like NLS P0CX63-0 |
| 457 | Amino Acid | Ty1-like NLS P0CX64-0 |
| 458 | Amino Acid | Ty1-like NLS P13902-0 |
| 459 | Amino Acid | Ty1-like NLS P14746-0 |
| 460 | Amino Acid | Ty1-like NLS P20484-0 |
| 461 | Amino Acid | Ty1-like NLS P22936-0 |
| 462 | Amino Acid | Ty1-like NLS P25384-0 |
| 463 | Amino Acid | Ty1-like NLS P32597-0 |
| 464 | Amino Acid | Ty1-like NLS P36006-0 |
| 465 | Amino Acid | Ty1-like NLS P36080-0 |
| 466 | Amino Acid | Ty1-like NLS P38112-0 |
| 467 | Amino Acid | Ty1-like NLS P47098-0 |
| 468 | Amino Acid | Ty1-like NLS P47100-0 |
| 469 | Amino Acid | Ty1-like NLS P51599-0 |
| 470 | Amino Acid | Ty1-like NLS P53119-0 |
| 471 | Amino Acid | Ty1-like NLS P53123-0 |
| 472 | Amino Acid | Ty1-like NLS P53125-0 |
| 473 | Amino Acid | Ty1-like NLS Q01301-0 |
| 474 | Amino Acid | Ty1-like NLS Q03434-0 |
| 475 | Amino Acid | Ty1-like NLS Q03494-0 |
| 476 | Amino Acid | Ty1-like NLS Q03612-0 |
| 477 | Amino Acid | Ty1-like NLS Q03619-0 |
| 478 | Amino Acid | Ty1-like NLS Q03707-0 |
| 479 | Amino Acid | Ty1-like NLS Q03855-0 |
| 480 | Amino Acid | Ty1-like NLS Q04214-0 |
| 481 | Amino Acid | Ty1-like NLS Q04500-0 |
| 482 | Amino Acid | Ty1-like NLS Q04670-0 |
| 483 | Amino Acid | Ty1-like NLS Q04711-0 |
| 484 | Amino Acid | Ty1-like NLS Q06132-0 |
| 485 | Amino Acid | Ty1-like NLS Q07163-0 |
| 486 | Amino Acid | Ty1-like NLS Q07509-0 |
| 487 | Amino Acid | Ty1-like NLS Q07791-0 |
| 488 | Amino Acid | Ty1-like NLS Q07793-0 |
| 489 | Amino Acid | Ty1-like NLS Q09094-0 |
| 490 | Amino Acid | Ty1-like NLS Q09180-0 |
| 491 | Amino Acid | Ty1-like NLS Q09180-1 |
| 492 | Amino Acid | Ty1-like NLS Q09180-2 |
| 493 | Amino Acid | Ty1-like NLS Q09863-0 |
| 494 | Amino Acid | Ty1-like NLS Q0U8V9-0 |
| 495 | Amino Acid | Ty1-like NLS Q12088-0 |
| 496 | Amino Acid | Ty1-like NLS Q12112-0 |
| 497 | Amino Acid | Ty1-like NLS Q12113-0 |
| 498 | Amino Acid | Ty1-like NLS Q12141-0 |
| 499 | Amino Acid | Ty1-like NLS Q12193-0 |
| 500 | Amino Acid | Ty1-like NLS Q12269-0 |
| 501 | Amino Acid | Ty1-like NLS Q12273-0 |
| 502 | Amino Acid | Ty1-like NLS Q12316-0 |
| 503 | Amino Acid | Ty1-like NLS Q12337-0 |
| 504 | Amino Acid | Ty1-like NLS Q12339-0 |
| 505 | Amino Acid | Ty1-like NLS Q12414-0 |
| 506 | Amino Acid | Ty1-like NLS Q12472-0 |
| 507 | Amino Acid | Ty1-like NLS Q12490-0 |
| 508 | Amino Acid | Ty1-like NLS Q12491-0 |
| 509 | Amino Acid | Ty1-like NLS Q12501-0 |
| 510 | Amino Acid | Ty1-like NLS Q1DNW5-0 |
| 511 | Amino Acid | Ty1-like NLS Q1EA54-0 |
| 512 | Amino Acid | Ty1-like NLS Q2HFA6-0 |
| 513 | Amino Acid | Ty1-like NLS Q2HFA6-1 |
| 514 | Amino Acid | Ty1-like NLS Q2UQI6-0 |
| 515 | Amino Acid | Ty1-like NLS Q4HZ42-0 |
| 516 | Amino Acid | Ty1-like NLS Q4P6I3-0 |
| 517 | Amino Acid | Ty1-like NLS Q4WHF8-0 |
| 518 | Amino Acid | Ty1-like NLS Q4WRV2-0 |
| 519 | Amino Acid | Ty1-like NLS Q4WXQ7-0 |
| 520 | Amino Acid | Ty1-like NLS Q5A2K0-0 |
| 521 | Amino Acid | Ty1-like NLS Q5A310-0 |
| 522 | Amino Acid | Ty1-like NLS Q5ACW8-0 |
| 523 | Amino Acid | Ty1-like NLS Q5B6K3-0 |
| 524 | Amino Acid | Ty1-like NLS Q6BXL7-0 |
| 525 | Amino Acid | Ty1-like NLS Q6C1L3-0 |
| 526 | Amino Acid | Ty1-like NLS Q6C233-0 |
| 527 | Amino Acid | Ty1-like NLS Q6C2J1-0 |
| 528 | Amino Acid | Ty1-like NLS Q6C7C0-0 |
| 529 | Amino Acid | Ty1-like NLS Q6CJY0-0 |
| 530 | Amino Acid | Ty1-like NLS Q6CJY0-1 |
| 531 | Amino Acid | Ty1-like NLS Q6FML5-0 |
| 532 | Amino Acid | Ty1-like NLS Q75F02-0 |
| 533 | Amino Acid | Ty1-like NLS Q7S2A9-0 |
| 534 | Amino Acid | Ty1-like NLS Q7S9J4-0 |
| 535 | Amino Acid | Ty1-like NLS Q7SFJ3-0 |
| 536 | Amino Acid | Ty1-like NLS Q875K1-0 |
| 537 | Amino Acid | Ty1-like NLS Q8SUT1-0 |
| 538 | Amino Acid | Ty1-like NLS Q8SVI7-0 |
| 539 | Amino Acid | Ty1-like NLS Q8SVI7-1 |
| 540 | Amino Acid | Ty1-like NLS Q92393-0 |
| 541 | Amino Acid | Ty1-like NLS Q99109-0 |
| 542 | Amino Acid | Ty1-like NLS Q99231-0 |
| 543 | Amino Acid | Ty1-like NLS Q99337-0 |
| 544 | Amino Acid | Ty1-like NLS Q9USK2-0 |
| 545 | Amino Acid | Ty1-like NLS Q9UTQ5-0 |
| 546 | Amino Acid | Ty1-like NLS A7MD48-0 |
| 547 | Amino Acid | Ty1-like NLS O15446-0 |
| 548 | Amino Acid | Ty1-like NLS O15446-1 |
| 549 | Amino Acid | Ty1-like NLS O15446-2 |
| 550 | Amino Acid | Ty1-like NLS O43148-0 |
| 551 | Amino Acid | Ty1-like NLS O60271-0 |
| 552 | Amino Acid | Ty1-like NLS O75128-0 |
| 553 | Amino Acid | Ty1-like NLS O75400-0 |
| 554 | Amino Acid | Ty1-like NLS O75691-0 |
| 555 | Amino Acid | Ty1-like NLS O75937-0 |
| 556 | Amino Acid | Ty1-like NLS O76021-0 |
| 557 | Amino Acid | Ty1-like NLS O94964-0 |
| 558 | Amino Acid | Ty1-like NLS P23497-0 |
| 559 | Amino Acid | Ty1-like NLS P30414-0 |
| 560 | Amino Acid | Ty1-like NLS P42081-0 |
| 561 | Amino Acid | Ty1-like NLS P46100-0 |
| 562 | Amino Acid | Ty1-like NLS P51608-0 |
| 563 | Amino Acid | Ty1-like NLS P59797-0 |
| 564 | Amino Acid | Ty1-like NLS P82979-0 |
| 565 | Amino Acid | Ty1-like NLS Q12830-0 |
| 566 | Amino Acid | Ty1-like NLS Q13409-0 |
| 567 | Amino Acid | Ty1-like NLS Q13427-0 |
| 568 | Amino Acid | Ty1-like NLS Q15361-0 |
| 569 | Amino Acid | Ty1-like NLS Q15361-1 |
| 570 | Amino Acid | Ty1-like NLS Q53SF7-0 |
| 571 | Amino Acid | Ty1-like NLS Q5M9Q1-0 |
| 572 | Amino Acid | Ty1-like NLS Q5T3I0-0 |
| 573 | Amino Acid | Ty1-like NLS Q5T3I0-1 |
| 574 | Amino Acid | Ty1-like NLS Q68D10-0 |
| 575 | Amino Acid | Ty1-like NLS Q6IPR3-0 |
| 576 | Amino Acid | Ty1-like NLS Q6PD62-0 |
| 577 | Amino Acid | Ty1-like NLS Q6PD62-1 |
| 578 | Amino Acid | Ty1-like NLS Q6PD62-2 |
| 579 | Amino Acid | Ty1-like NLS Q6S8J7-0 |
| 580 | Amino Acid | Ty1-like NLS Q6ZU65-0 |
| 581 | Amino Acid | Ty1-like NLS Q7Z7B0-0 |
| 582 | Amino Acid | Ty1-like NLS Q8N9E0-0 |
| 583 | Amino Acid | Ty1-like NLS Q8NCU4-0 |
| 584 | Amino Acid | Ty1-like NLS Q8NFU7-0 |
| 585 | Amino Acid | Ty1-like NLS Q96DY2-0 |
| 586 | Amino Acid | Ty1-like NLS Q96GD3-0 |
| 587 | Amino Acid | Ty1-like NLS Q96P65-0 |
| 588 | Amino Acid | Ty1-like NLS Q96QC0-0 |
| 589 | Amino Acid | Ty1-like NLS Q9BQG0-0 |
| 590 | Amino Acid | Ty1-like NLS Q9BQG0-1 |
| 591 | Amino Acid | Ty1-like NLS Q9BRU9-0 |
| 592 | Amino Acid | Ty1-like NLS Q9H0S4-0 |
| 593 | Amino Acid | Ty1-like NLS Q9H6F5-0 |
| 594 | Amino Acid | Ty1-like NLS Q9HCK1-0 |
| 595 | Amino Acid | Ty1-like NLS Q9HCK8-0 |
| 596 | Amino Acid | Ty1-like NLS Q9NPI1-0 |
| 597 | Amino Acid | Ty1-like NLS Q9NSV4-0 |
| 598 | Amino Acid | Ty1-like NLS Q9NUL3-0 |
| 599 | Amino Acid | Ty1-like NLS Q9NWT1-0 |
| 600 | Amino Acid | Ty1-like NLS Q9NX58-0 |
| 601 | Amino Acid | Ty1-like NLS Q9UGU5-0 |
| 602 | Amino Acid | Ty1-like NLS Q9UNS1-0 |
| 603 | Amino Acid | Ty1-like NLS Q9Y2X3-0 |
| 604 | Amino Acid | Ty1-like NLS Q9Y6X0-0 |
| 605 | Amino Acid | Ty1-like NLS A0A1I8M2I8-0 |
| 606 | Amino Acid | Ty1-like NLS A1XDC0-0 |
| 607 | Amino Acid | Ty1-like NLS A7S6A5-0 |
| 608 | Amino Acid | Ty1-like NLS A8XI07-0 |
| 609 | Amino Acid | Ty1-like NLS A8XI07-1 |
| 610 | Amino Acid | Ty1-like NLS C0HKU9-0 |
| 611 | Amino Acid | Ty1-like NLS C6KTD2-0 |
| 612 | Amino Acid | Ty1-like NLS O16140-0 |
| 613 | Amino Acid | Ty1-like NLS O17828-0 |
| 614 | Amino Acid | Ty1-like NLS O17966-0 |
| 615 | Amino Acid | Ty1-like NLS O44410-0 |
| 616 | Amino Acid | Ty1-like NLS O44410-1 |
| 617 | Amino Acid | Ty1-like NLS O45244-0 |
| 618 | Amino Acid | Ty1-like NLS P0DP78-0 |
| 619 | Amino Acid | Ty1-like NLS P0DP78-1 |
| 620 | Amino Acid | Ty1-like NLS P0DP79-0 |
| 621 | Amino Acid | Ty1-like NLS P0DP79-1 |
| 622 | Amino Acid | Ty1-like NLS P0DP80-0 |
| 623 | Amino Acid | Ty1-like NLS P0DP80-1 |
| 624 | Amino Acid | Ty1-like NLS P0DP81-0 |
| 625 | Amino Acid | Ty1-like NLS P0DP81-1 |
| 626 | Amino Acid | Ty1-like NLS P14196-0 |
| 627 | Amino Acid | Ty1-like NLS P22058-0 |
| 628 | Amino Acid | Ty1-like NLS P26023-0 |
| 629 | Amino Acid | Ty1-like NLS P26991-0 |
| 630 | Amino Acid | Ty1-like NLS P35978-0 |
| 631 | Amino Acid | Ty1-like NLS P46758-0 |
| 632 | Amino Acid | Ty1-like NLS P46758-1 |
| 633 | Amino Acid | Ty1-like NLS P46867-0 |
| 634 | Amino Acid | Ty1-like NLS P54644-0 |
| 635 | Amino Acid | Ty1-like NLS P54812-0 |
| 636 | Amino Acid | Ty1-like NLS P83212-0 |
| 637 | Amino Acid | Ty1-like NLS Q04621-0 |
| 638 | Amino Acid | Ty1-like NLS Q08696-0 |
| 639 | Amino Acid | Ty1-like NLS Q08696-1 |
| 640 | Amino Acid | Ty1-like NLS Q08696-2 |
| 641 | Amino Acid | Ty1-like NLS Q08696-3 |
| 642 | Amino Acid | Ty1-like NLS Q08696-4 |
| 643 | Amino Acid | Ty1-like NLS Q08696-5 |
| 644 | Amino Acid | Ty1-like NLS Q08696-6 |
| 645 | Amino Acid | Ty1-like NLS Q09223-0 |
| 646 | Amino Acid | Ty1-like NLS Q09595-0 |
| 647 | Amino Acid | Ty1-like NLS Q1ELU8-0 |
| 648 | Amino Acid | Ty1-like NLS Q23120-0 |
| 649 | Amino Acid | Ty1-like NLS Q23272-0 |
| 650 | Amino Acid | Ty1-like NLS Q24537-0 |
| 651 | Amino Acid | Ty1-like NLS Q27450-0 |
| 652 | Amino Acid | Ty1-like NLS Q29DY1-0 |
| 653 | Amino Acid | Ty1-like NLS Q4N4T9-0 |
| 654 | Amino Acid | Ty1-like NLS Q54QQ2-0 |
| 655 | Amino Acid | Ty1-like NLS Q54QQ2-1 |
| 656 | Amino Acid | Ty1-like NLS Q54S20-0 |
| 657 | Amino Acid | Ty1-like NLS Q54US6-0 |
| 658 | Amino Acid | Ty1-like NLS Q54VU4-0 |
| 659 | Amino Acid | Ty1-like NLS Q54XP6-0 |
| 660 | Amino Acid | Ty1-like NLS Q551H0-0 |
| 661 | Amino Acid | Ty1-like NLS Q557G1-0 |
| 662 | Amino Acid | Ty1-like NLS Q55CE0-0 |
| 663 | Amino Acid | Ty1-like NLS Q61R02-0 |
| 664 | Amino Acid | Ty1-like NLS Q75JP5-0 |
| 665 | Amino Acid | Ty1-like NLS Q8I5P7-0 |
| 666 | Amino Acid | Ty1-like NLS Q8I5P7-1 |
| 667 | Amino Acid | Ty1-like NLS Q8IBP1-0 |
| 668 | Amino Acid | Ty1-like NLS Q8ILR9-0 |
| 669 | Amino Acid | Ty1-like NLS Q93591-0 |
| 670 | Amino Acid | Ty1-like NLS Q95Y36-0 |
| 671 | Amino Acid | Ty1-like NLS Q9NBL2-0 |
| 672 | Amino Acid | Ty1-like NLS Q9NDE8-0 |
| 673 | Amino Acid | Ty1-like NLS Q9NDE8-1 |
| 674 | Amino Acid | Ty1-like NLS Q9NDE8-2 |
| 675 | Amino Acid | Ty1-like NLS Q9V5P6-0 |
| 676 | Amino Acid | Ty1-like NLS Q9VDS6-0 |
| 677 | Amino Acid | Ty1-like NLS Q9VGW1-0 |
| 678 | Amino Acid | Ty1-like NLS Q9VH89-0 |
| 679 | Amino Acid | Ty1-like NLS Q9VKM6-0 |
| 680 | Amino Acid | Ty1-like NLS Q9VNH1-0 |
| 681 | Amino Acid | Ty1-like NLS Q9W261-0 |
| 682 | Amino Acid | Ty1-like NLS E1B7L7-0 |
| 683 | Amino Acid | Ty1-like NLS Q08DU1-0 |
| 684 | Amino Acid | Ty1-like NLS Q0III3-0 |
| 685 | Amino Acid | Ty1-like NLS Q17QH9-0 |
| 686 | Amino Acid | Ty1-like NLS Q29S22-0 |
| 687 | Amino Acid | Ty1-like NLS Q2KIQ2-0 |
| 688 | Amino Acid | Ty1-like NLS Q2KJE1-0 |
| 689 | Amino Acid | Ty1-like NLS Q2KJE1-1 |
| 690 | Amino Acid | Ty1-like NLS Q2TBX7-0 |
| 691 | Amino Acid | Ty1-like NLS Q4R7K1-0 |
| 692 | Amino Acid | Ty1-like NLS Q4R8Y5-0 |
| 693 | Amino Acid | Ty1-like NLS Q58DE2-0 |
| 694 | Amino Acid | Ty1-like NLS Q58DU0-0 |
| 695 | Amino Acid | Ty1-like NLS Q5E9U4-0 |
| 696 | Amino Acid | Ty1-like NLS Q5NVM2-0 |
| 697 | Amino Acid | Ty1-like NLS Q5R4V4-0 |
| 698 | Amino Acid | Ty1-like NLS Q5R8B0-0 |
| 699 | Amino Acid | Ty1-like NLS Q5RB69-0 |
| 700 | Amino Acid | Ty1-like NLS Q5RCE6-0 |
| 701 | Amino Acid | Ty1-like NLS Q5TM61-0 |
| 702 | Amino Acid | Ty1-like NLS Q767K9-0 |
| 703 | Amino Acid | Ty1-like NLS Q7YQM3-0 |
| 704 | Amino Acid | Ty1-like NLS Q7YQM4-0 |
| 705 | Amino Acid | Ty1-like NLS Q7YR38-0 |
| 706 | Amino Acid | Ty1-like NLS Q95KD7-0 |
| 707 | Amino Acid | Ty1-like NLS Q95LG8-0 |
| 708 | Amino Acid | Ty1-like NLS Q9N1Q7-0 |
| 709 | Amino Acid | Ty1-like NLS A2WSD3-0 |
| 710 | Amino Acid | Ty1-like NLS A2XVF7-0 |
| 711 | Amino Acid | Ty1-like NLS A2XVF7-1 |
| 712 | Amino Acid | Ty1-like NLS A2XVF7-2 |
| 713 | Amino Acid | Ty1-like NLS A2XVF7-3 |
| 714 | Amino Acid | Ty1-like NLS A3AVH5-0 |
| 715 | Amino Acid | Ty1-like NLS A3AVH5-1 |
| 716 | Amino Acid | Ty1-like NLS A3AVH5-2 |
| 717 | Amino Acid | Ty1-like NLS A3AVH5-3 |
| 718 | Amino Acid | Ty1-like NLS A4QJZ0-0 |
| 719 | Amino Acid | Ty1-like NLS A4QK78-0 |
| 720 | Amino Acid | Ty1-like NLS A4QKG5-0 |
| 721 | Amino Acid | Ty1-like NLS A4QKQ3-0 |
| 722 | Amino Acid | Ty1-like NLS A6MN03-0 |
| 723 | Amino Acid | Ty1-like NLS A8MS85-0 |
| 724 | Amino Acid | Ty1-like NLS A9XMT3-0 |
| 725 | Amino Acid | Ty1-like NLS B8YIE8-0 |
| 726 | Amino Acid | Ty1-like NLS F4HVZ5-0 |
| 727 | Amino Acid | Ty1-like NLS F4IQK5-0 |
| 728 | Amino Acid | Ty1-like NLS F4IQK5-1 |
| 729 | Amino Acid | Ty1-like NLS O22812-0 |
| 730 | Amino Acid | Ty1-like NLS O49323-0 |
| 731 | Amino Acid | Ty1-like NLS O64571-0 |
| 732 | Amino Acid | Ty1-like NLS O64639-0 |
| 733 | Amino Acid | Ty1-like NLS O64639-1 |
| 734 | Amino Acid | Ty1-like NLS O64639-2 |
| 735 | Amino Acid | Ty1-like NLS O65743-0 |
| 736 | Amino Acid | Ty1-like NLS O81072-0 |
| 737 | Amino Acid | Ty1-like NLS P09975-0 |
| 738 | Amino Acid | Ty1-like NLS P0C262-0 |
| 739 | Amino Acid | Ty1-like NLS P29345-0 |
| 740 | Amino Acid | Ty1-like NLS P50888-0 |
| 741 | Amino Acid | Ty1-like NLS P51269-0 |
| 742 | Amino Acid | Ty1-like NLS P51430-0 |
| 743 | Amino Acid | Ty1-like NLS Q06FP6-0 |
| 744 | Amino Acid | Ty1-like NLS Q06FP6-1 |
| 745 | Amino Acid | Ty1-like NLS Q06FP6-2 |
| 746 | Amino Acid | Ty1-like NLS Q06R72-0 |
| 747 | Amino Acid | Ty1-like NLS Q06R98-0 |
| 748 | Amino Acid | Ty1-like NLS Q1KVQ9-0 |
| 749 | Amino Acid | Ty1-like NLS Q1XDL7-0 |
| 750 | Amino Acid | Ty1-like NLS Q38873-0 |
| 751 | Amino Acid | Ty1-like NLS Q3E8X3-0 |
| 752 | Amino Acid | Ty1-like NLS Q3ZJ77-0 |
| 753 | Amino Acid | Ty1-like NLS Q42438-0 |
| 754 | Amino Acid | Ty1-like NLS Q4V3E0-0 |
| 755 | Amino Acid | Ty1-like NLS Q66GN2-0 |
| 756 | Amino Acid | Ty1-like NLS Q6K5K2-0 |
| 757 | Amino Acid | Ty1-like NLS Q6YS30-0 |
| 758 | Amino Acid | Ty1-like NLS Q84WK0-0 |
| 759 | Amino Acid | Ty1-like NLS Q84Y18-0 |
| 760 | Amino Acid | Ty1-like NLS Q8H991-0 |
| 761 | Amino Acid | Ty1-like NLS Q8RWY7-0 |
| 762 | Amino Acid | Ty1-like NLS Q8RWY7-1 |
| 763 | Amino Acid | Ty1-like NLS Q8VZ67-0 |
| 764 | Amino Acid | Ty1-like NLS Q8VZN4-0 |
| 765 | Amino Acid | Ty1-like NLS Q8W0K2-0 |
| 766 | Amino Acid | Ty1-like NLS Q8W490-0 |
| 767 | Amino Acid | Ty1-like NLS Q9CAE4-0 |
| 768 | Amino Acid | Ty1-like NLS Q9FMZ4-0 |
| 769 | Amino Acid | Ty1-like NLS Q9FMZ4-1 |
| 770 | Amino Acid | Ty1-like NLS Q9FRI0-0 |
| 771 | Amino Acid | Ty1-like NLS Q9LKI5-0 |
| 772 | Amino Acid | Ty1-like NLS Q9LUJ5-0 |
| 773 | Amino Acid | Ty1-like NLS Q9LUR0-0 |
| 774 | Amino Acid | Ty1-like NLS Q9LVU8-0 |
| 775 | Amino Acid | Ty1-like NLS Q9LVU8-1 |
| 776 | Amino Acid | Ty1-like NLS Q9LYK7-0 |
| 777 | Amino Acid | Ty1-like NLS Q9M020-0 |
| 778 | Amino Acid | Ty1-like NLS Q9M1L7-0 |
| 779 | Amino Acid | Ty1-like NLS Q9M3V8-0 |
| 780 | Amino Acid | Ty1-like NLS Q9SRQ3-0 |
| 781 | Amino Acid | Ty1-like NLS Q9ZPV5-0 |
| 782 | Amino Acid | Ty1-like NLS B1AQJ2-0 |
| 783 | Amino Acid | Ty1-like NLS D3ZUI5-0 |
| 784 | Amino Acid | Ty1-like NLS D4A666-0 |
| 785 | Amino Acid | Ty1-like NLS E1U8D0-0 |
| 786 | Amino Acid | Ty1-like NLS G3V8T1-0 |
| 787 | Amino Acid | Ty1-like NLS O35821-0 |
| 788 | Amino Acid | Ty1-like NLS O88487-0 |
| 789 | Amino Acid | Ty1-like NLS O88665-0 |
| 790 | Amino Acid | Ty1-like NLS P61364-0 |
| 791 | Amino Acid | Ty1-like NLS P61365-0 |
| 792 | Amino Acid | Ty1-like NLS P83858-0 |
| 793 | Amino Acid | Ty1-like NLS P83861-0 |
| 794 | Amino Acid | Ty1-like NLS Q00566-0 |
| 795 | Amino Acid | Ty1-like NLS Q05CL8-0 |
| 796 | Amino Acid | Ty1-like NLS Q09XV5-0 |
| 797 | Amino Acid | Ty1-like NLS Q3TFK5-0 |
| 798 | Amino Acid | Ty1-like NLS Q3TFK5-1 |
| 799 | Amino Acid | Ty1-like NLS Q3TFK5-2 |
| 800 | Amino Acid | Ty1-like NLS Q3TYA6-0 |
| 801 | Amino Acid | Ty1-like NLS Q3UMF0-0 |
| 802 | Amino Acid | Ty1-like NLS Q498U4-0 |
| 803 | Amino Acid | Ty1-like NLS Q4V7C4-0 |
| 804 | Amino Acid | Ty1-like NLS Q4V8G7-0 |
| 805 | Amino Acid | Ty1-like NLS Q505I5-0 |
| 806 | Amino Acid | Ty1-like NLS Q562C7-0 |
| 807 | Amino Acid | Ty1-like NLS Q566R3-0 |
| 808 | Amino Acid | Ty1-like NLS Q566R3-1 |
| 809 | Amino Acid | Ty1-like NLS Q566R3-2 |
| 810 | Amino Acid | Ty1-like NLS Q58A65-0 |
| 811 | Amino Acid | Ty1-like NLS Q5NBX1-0 |
| 812 | Amino Acid | Ty1-like NLS Q5XG71-0 |
| 813 | Amino Acid | Ty1-like NLS Q5XI01-0 |
| 814 | Amino Acid | Ty1-like NLS Q5XIB5-0 |
| 815 | Amino Acid | Ty1-like NLS Q5XIR6-0 |
| 816 | Amino Acid | Ty1-like NLS Q60848-0 |
| 817 | Amino Acid | Ty1-like NLS Q62018-0 |
| 818 | Amino Acid | Ty1-like NLS Q62018-1 |
| 819 | Amino Acid | Ty1-like NLS Q62187-0 |
| 820 | Amino Acid | Ty1-like NLS Q62871-0 |
| 821 | Amino Acid | Ty1-like NLS Q63520-0 |
| 822 | Amino Acid | Ty1-like NLS Q642C0-0 |
| 823 | Amino Acid | Ty1-like NLS Q68SB1-0 |
| 824 | Amino Acid | Ty1-like NLS Q6AYK5-0 |
| 825 | Amino Acid | Ty1-like NLS Q6NZB0-0 |
| 826 | Amino Acid | Ty1-like NLS Q76KJ5-0 |
| 827 | Amino Acid | Ty1-like NLS Q76KJ5-1 |
| 828 | Amino Acid | Ty1-like NLS Q76KJ5-2 |
| 829 | Amino Acid | Ty1-like NLS Q78WZ7-0 |
| 830 | Amino Acid | Ty1-like NLS Q78WZ7-1 |
| 831 | Amino Acid | Ty1-like NLS Q7TNB4-0 |
| 832 | Amino Acid | Ty1-like NLS Q7TPV4-0 |
| 833 | Amino Acid | Ty1-like NLS Q80WC1-0 |
| 834 | Amino Acid | Ty1-like NLS Q80Z37-0 |
| 835 | Amino Acid | Ty1-like NLS Q811R2-0 |
| 836 | Amino Acid | Ty1-like NLS Q8BKA3-0 |
| 837 | Amino Acid | Ty1-like NLS Q8CJ67-0 |
| 838 | Amino Acid | Ty1-like NLS Q8K214-0 |
| 839 | Amino Acid | Ty1-like NLS Q8K4T4-0 |
| 840 | Amino Acid | Ty1-like NLS Q8R5F3-0 |
| 841 | Amino Acid | Ty1-like NLS Q91X13-0 |
| 842 | Amino Acid | Ty1-like NLS Q9CS72-0 |
| 843 | Amino Acid | Ty1-like NLS Q9CVI2-0 |
| 844 | Amino Acid | Ty1-like NLS Q9CWX9-0 |
| 845 | Amino Acid | Ty1-like NLS Q9CZX5-0 |
| 846 | Amino Acid | Ty1-like NLS Q9D1J3-0 |
| 847 | Amino Acid | Ty1-like NLS Q9D3V1-0 |
| 848 | Amino Acid | Ty1-like NLS Q9DBQ9-0 |
| 849 | Amino Acid | Ty1-like NLS Q9JIX5-0 |
| 850 | Amino Acid | Ty1-like NLS Q9JJ80-0 |
| 851 | Amino Acid | Ty1-like NLS Q9JJ89-0 |
| 852 | Amino Acid | Ty1-like NLS Q9R1C7-0 |
| 853 | Amino Acid | Ty1-like NLS Q9R1X4-0 |
| 854 | Amino Acid | Ty1-like NLS Q9Z180-0 |
| 855 | Amino Acid | Ty1-like NLS Q9Z207-0 |
| 856 | Amino Acid | Ty1-like NLS Q9Z2D6-0 |
| 857 | Amino Acid | Ty1-like NLS A0A1L8GSA2-0 |
| 858 | Amino Acid | Ty1-like NLS A0JP82-0 |
| 859 | Amino Acid | Ty1-like NLS A1A5I1-0 |
| 860 | Amino Acid | Ty1-like NLS A1L2T6-0 |
| 861 | Amino Acid | Ty1-like NLS A2RUV0-0 |
| 862 | Amino Acid | Ty1-like NLS A9JRD8-0 |
| 863 | Amino Acid | Ty1-like NLS E7F568-0 |
| 864 | Amino Acid | Ty1-like NLS F1QFU0-0 |
| 865 | Amino Acid | Ty1-like NLS F1QWK4-0 |
| 866 | Amino Acid | Ty1-like NLS K9JHZ4-0 |
| 867 | Amino Acid | Ty1-like NLS P07193-0 |
| 868 | Amino Acid | Ty1-like NLS P0CB65-0 |
| 869 | Amino Acid | Ty1-like NLS P12957-0 |
| 870 | Amino Acid | Ty1-like NLS P13505-0 |
| 871 | Amino Acid | Ty1-like NLS P21783-0 |
| 872 | Amino Acid | Ty1-like NLS Q28BS0-0 |
| 873 | Amino Acid | Ty1-like NLS Q28BS0-1 |
| 874 | Amino Acid | Ty1-like NLS Q28G05-0 |
| 875 | Amino Acid | Ty1-like NLS Q32N87-0 |
| 876 | Amino Acid | Ty1-like NLS Q3KPW4-0 |
| 877 | Amino Acid | Ty1-like NLS Q4QR29-0 |
| 878 | Amino Acid | Ty1-like NLS Q4QR29-1 |
| 879 | Amino Acid | Ty1-like NLS Q5BL56-0 |
| 880 | Amino Acid | Ty1-like NLS Q5XJK9-0 |
| 881 | Amino Acid | Ty1-like NLS Q5ZIJ0-0 |
| 882 | Amino Acid | Ty1-like NLS Q640I9-0 |
| 883 | Amino Acid | Ty1-like NLS Q6DEU9-0 |
| 884 | Amino Acid | Ty1-like NLS Q6DEU9-1 |
| 885 | Amino Acid | Ty1-like NLS Q6DEU9-2 |
| 886 | Amino Acid | Ty1-like NLS Q6DK85-0 |
| 887 | Amino Acid | Ty1-like NLS Q6DRI7-0 |
| 888 | Amino Acid | Ty1-like NLS Q6DRL5-0 |
| 889 | Amino Acid | Ty1-like NLS Q6NV26-0 |
| 890 | Amino Acid | Ty1-like NLS Q6NWI1-0 |
| 891 | Amino Acid | Ty1-like NLS Q6NYJ3-0 |
| 892 | Amino Acid | Ty1-like NLS Q6P4K1-0 |
| 893 | Amino Acid | Ty1-like NLS Q6WKW9-0 |
| 894 | Amino Acid | Ty1-like NLS Q7ZUF2-0 |
| 895 | Amino Acid | Ty1-like NLS Q7ZW47-0 |
| 896 | Amino Acid | Ty1-like NLS Q7ZXZ0-0 |
| 897 | Amino Acid | Ty1-like NLS Q7ZXZ0-1 |
| 898 | Amino Acid | Ty1-like NLS Q7ZYR8-0 |
| 899 | Amino Acid | Ty1-like NLS Q8AVQ6-0 |
| 900 | Amino Acid | Ty1-like NLS Q9DE07-0 |
| 901 | Amino Acid | Ty1-like NLS P03086-0 |
| 902 | Amino Acid | Ty1-like NLS P09814-0 |
| 903 | Amino Acid | Ty1-like NLS P0CK10-0 |
| 904 | Amino Acid | Ty1-like NLS P15075-0 |
| 905 | Amino Acid | Ty1-like NLS P51724-0 |
| 906 | Amino Acid | Ty1-like NLS P52344-0 |
| 907 | Amino Acid | Ty1-like NLS P52531-0 |
| 908 | Amino Acid | Ty1-like NLS Q5UP41-0 |
| 909 | Amino Acid | Ty1-like NLS Q9DUC0-0 |
| 910 | Amino Acid | Ty1-like NLS Q9XJS3-0 |

### EXPERIMENTAL EXAMPLES

[0287] The invention is further described in detail by reference to the following experimental examples. These examples are provided for purposes of illustration only and are not intended to be limiting unless otherwise specified. Thus, the invention should in no way be construed as being limited to the following examples, but rather, should be construed to encompass any and all variations which become evident as a result of the teaching provided herein.

[0288] Without further description, it is believed that one of ordinary skill in the art can, using the preceding description and the following illustrative examples, make and utilize the present invention and practice the claimed methods. The following working examples, therefore, specifically point out certain embodiments of the present invention, and are not to be construed as limiting in any way the remainder of the disclosure.

### Example 1: Targeted Destruction of Coronavirus RNA by CRISPR-Cas13 Delivered with Integration Deficient Lentiviral Vectors

[0289] The data presented herein demonstrate the efficacy of using RNA-targeting CRISPR-Cas13 platforms as an approach to 1) identify effective CRISPR-guide RNAs targeting essential and conserved coronavirus RNA sequences, 2) identify the most robust guide-RNA and CRISPR-Cas13 platforms for robust coronavirus RNA cleavage, and 3),harness non-integrating lentiviral vectors pseudotyped with coronavirus Spike protein. These experiments represent a major first step toward the development of a novel targeted therapeutic for treating coronavirus infections. Notably, the rapid programmability and delivery of this approach could be adapted to target diverse coronavirus strains or other infectious RNA viruses, such as influenza.

### Coronavirus Lifecycle

[0290] Coronavirus genomes are encoded by a large (˜30kb), single-stranded mRNA, which is capped and polyadenylated, allowing for translation by host proteins. Coronavirus genomes replicate entirely through RNA intermediates, generating both full-length genomic mRNA and nested subgenomic mRNAs, allowing for expression of numerous viral proteins.

### Targeting

[0291] As a result of coronavirus replication and transcription, 5′ sequences (Leader) and 3′ sequences (S2M or Nucleocapsid ORF) are common to genomic and all subgenomic RNAs (FIG. 1). These sequences provide the opportunity for design of guide-RNAs which have the capacity for broad efficacy. Tiling CRISPR RNAs (crRNAs) are tested in cell-based luciferase reporter assays using a luciferase reporter mRNA containing coronavirus target sequences in 5′ UTR or 3′UTR regions.

### Cleavage

[0292] RNA cleavage efficacy and specificity of coronavirus target sequences are determined in the above assays utilizing novel CRISPR-Cas13 systems (eraseR platforms), with enhanced guide-RNA expression constructs and/or CRISPR arrays (FIG. 2).

### Delivery

[0293] Lentiviral vectors are enveloped and can be pseudotyped with different viral envelope proteins to alter viral tropism (FIG. 3). The efficacy and stability of lentiviral vectors pseudotyped with coronavirus envelope spike protein to transduce ACE2-expressing cell types is determined. Nonintegrating, 3rd generation lentiviral vectors, produced using catalytically inactive Integrase, offer a safe and transient expression approach for viral RNA clearance, without permanent expression.

[0294] Lentiviral constructs encoding CRISPR-Cas13 components can be packaged into non-integrating lentiviral particles pseudotyped with viral envelope proteins. For example, the lentiviral particle can be pseudotyped with the Spike glycoprotein from SARS-CoV-2 coronavirus, which provides specificity for entry into ACE2 receptor expressing cells. (FIG. 4B). This allows for specific targeting of ‘coronavirus-targeted’ cell types. Post-transduction, the processing and formation of non-integrating lentiviral episomes allows for transient expression of CRISPR-Cas13 components for acute targeted degradation of CoV genomic and subgenomic viral mRNAs (FIG. 4C).

[0295] A Luciferase reporter containing the SARS-2-CoV S2M sequence was used. (FIG. 7A). Seven crRNAs were designed targeting the CoV leader sequence. (FIG. 7B). Cell-based luciferase assays demonstrate robust knockdown of CoV Leader Luc reporter activity in cells with crRNAs targeting SARS-CoV-2 leader sequence (crRNAs A through G) or Luciferase coding sequence (Luc), relative to a non-targeting crRNA (FIG. 7C).

[0296] Additionally, a Luciferase reporter containing the SARS-2-CoV S2M sequence was used. (FIG. 8A). Six crRNAs were designed targeting the SARS-2-CoV S2M sequence. (FIG. 8B). Cell-based luciferase assays demonstrate robust knockdown of CoV S2M Luc reporter activity in cells with crRNAs targeting SARS-CoV-2 S2M sequence (crRNAs A through F) or Luciferase coding sequence (Luc), relative to a non-targeting crRNA (FIG. 8C).

### Example 2: One-Step Directional Assembly of CRISPR-Cas13 crRNA Arrays

[0297] The data provided herein demonstrates the design and validation of an approach to generate crRNA arrays by direct ligation of multiple annealed oligo pairs containing nucleotide substitutions within DR sequences (FIG. 9D). This rapid assembly approach was used to efficiently generate tandem ordered arrays for 3 spacer sequences, which notably, do not contain poly T stretches within the DR sequence, thereby promoting full-length array transcription. Given other potential nucleotide substitutions in these positions, arrays of up to 7 crRNAs lacking a DR T stretch could be assembled in a single-step, or arrays up to 8 crRNAs if a DR T stretch is included (FIG. 9E).

[0298] CRISPR-Cas13 guide RNAs occur naturally in bacterial species in tandem arrays, which are subsequently processed into single guides by Cas13-mediated cleavage (FIG. 9A). This cleavage activity is separable from target RNA cleavage activity, thus ‘catalytically dead’ (dCas13) retains this crRNA processing ability. Many CRISPR-Cas13 direct repeats contain poly T sequences of 4-5 nucleotides which have the potential to inhibit single or tandem full-length crRNA expression from commonly used Pol III promoters, such as hU6, in mammalian cells (FIG. 9B). Crystallography studies have revealed that the poly T stretches occur in the loop region of the direct repeat (DR), and that at least one T nucleotide projects into space, suggesting it doesn't play an important role in CRISPR-Cas13 binding or cleavage. As shown herein, mutation of two positions within this T stretch, T17C or T18C, does not inhibit dCas13 or Cas13-mediated activity. Thus, these changes can be harnessed to generate diversity within the DR sequence to allow for multiplex, directional cloning.

[0299] Mammalian guide-RNA expression cassettes are generally created by cloning annealed oligonucleotides comprising the spacer sequence into a cassette comprised of a mammalian Pol III promoter, a Direct Repeat and a terminator of 6 or more Ts (FIG. 9C). Commonly, multiple guide-RNAs are expressed by adding addition Pol III promoter cassettes, however this can significantly increase the complexity and size of the vector. Generation of tandem crRNA arrays would significantly decrease the size requirements of the vector; however, nucleotide synthesis of long arrays is prohibited due to size and the repeat nature of DR sequences.

### Example 3: Enhanced Knockdown of SARS-CoV-2 Viral Sequences with a CRISPR crRNA Array

[0300] Example 4 demonstrates the design and validation of CRISPR guide-RNAs capable of robust knockdown of a luciferase reporter encoding SARS-CoV-2 viral sequences. Example 5 demonstrates the development of a cloning strategy for the directional assembly of tandem crRNA arrays, which take advantage of base substitutions in non-essential residues within the loop region of Cas13b Direct Repeat (FIG. 9E and FIG. 10A). The data presented herein demonstrates that all possible base mutations within these two loop residues (T17 and T18) do not negatively affect guide RNA targeting and knockdown of a luciferase reporter mRNA for two independent guide RNAs targeting luciferase coding sequence (Luc-a and Luc-b) (FIG. 10B).

[0301] Lentiviral gene transfer vectors encoding CRISPR-Cas13 with single or triple crRNA arrays targeting SARS-CoV-2 viral sequences were developed. (FIG. 11A). A luciferase reporter was constructed containing Leader and N protein SARS-CoV-2 viral target sequences, encoded in both the 5′ and 3′ UTR regions of a Luciferase reporter mRNA (FIG. 11B). The data presented herein shows that expression of multiple guide-RNAs from a single promoter, encoded in a lentiviral transfer vector, results in greater luciferase activity knockdown compared with expression of a single guide RNA (FIG. 11C). These results demonstrate greater efficacy for using multiple guide-RNAs targeting a single viral genome, with the added benefit that multiple guide RNAs may further prevent viral ‘escape,’ which may occur through random mutagenesis or by therapeutic selection.

[0302] Additionally, the CRISPR-Cas13 expression cassette encoding the tripe guide array is small enough to be packaged within an AAV vector, which may be a useful alternative viral gene therapy delivery method (FIG. 12).

### Example 4: Targeting Influenza Virus Subtypes with CRISPR-Cas13

[0303] Examples 4 and 6 demonstrate that CRISPR-Cas13 can efficiently knockdown the expression of a luciferase reporter encoding coronavirus SARS-CoV-2 viral sequences. Based on the replication characteristics, single guide RNAs can be designed to target all coronavirus genomic and subgenomic RNAs. Additionally, expression of multiple guide RNAs in an array, expressed from a single promoter, resulted in enhanced viral reporter knockdown.

[0304] Similar to coronavirus, Influenza viruses are enveloped, RNA viruses which infect both animals and humans and have significant potential for becoming global pandemics. In contrast to coronavirus, influenza virus is composed of 8 independent viral RNA segments, which localize and replicate within the vertebrate nucleus (FIG. 13A). Viral RNA (vRNA) segments encode at least 10 proteins, which encode viral replication enzymes, structural proteins and envelope glycoproteins required for host cell binding and fusion. The multi-segment viral RNA genome allows for rapid mutation and viral selection; as viral segments can be readily switched between viral subtypes within infected cells. This has led to a diverse number of Influenza subtypes, which are categorized by envelope proteins Hemagglutinin (HA) and Neuraminidase (NA). These features present a unique challenge for the targeted degradation of Influenza viral RNA by CRISPR-Cas13.

[0305] The data presented herein presents the design of crRNAs which could target the 4 major Influenza A viral subtypes which have cause significant human disease in the recent past, and retain significant potential for becoming global pandemics (H1N1, H2N2, H3N2 and H7N9). Using multiple sequence alignment of viral protein coding sequences across these four subtypes, conserved segments were identified for five of the 8 viral segments (Table 2). Large conserved viral sequences across subtypes for HA and NA genes were not identified, consistent with their rapid evolution which enables evasion to host immunity. For these five regions, guide RNAs were designed to target either the negative-sense viral RNA (vRNA) or positive-sense viral protein coding mRNA. Guide-RNA arrays were designed to express all five crRNAs from a single Pol III promoter.

[0306] Encoding CRISPR guide arrays and Cas13 expression cassettes within a lentiviral gene transfer vector (or alternative gene therapy vector, such as AAV), would allow for the generation of a single particle for delivery and expression of CRISPR-Cas13 components to vertebrate cells (FIG. 14). Pseudotyping lentiviral vectors with NA and HA envelope proteins could be utilized to target specific cell types infected by Influenza virus, such as airway epithelia.

TABLE 2
Sequence alignment and identification of conserved coding sequences among
Influenza A Segments from H1N1, H2N2, H3N2, H7N9.

| | | SEQ |
|---|---|---|
| | | ID NO |
| SEGMENT 1 | | |
| H1N1 | GTGTTGGTAATGAAACGAAAACGGGACTCTAGCATACTTACTGACAGCCAGACAGCGACC | 225 |
| | 2253 | |
| H3N2 | GTGTTGGTAATGAAACGAAAACGGGACTCTAGCATACTTACTGACAGCCAGACAGCGACC | 226 |
| | 2280 | |
| H7N9 | GTGTTGGTGATGAAACGGAAACGGGACTCTAGCATACTTACTGACAGTCAGACAGCGACC | 227 |
| | 2253 | |
| H2N2 | GTGTTGGTAATGAAACGAAAACGGGACTCTAGCATACTTACTGACAGCCAGACAGCGACC | 228 |
| | 2280 | |
| | ********.********.****************************************** | |
| SEGMENT 2 | | |
| H1N1 | GGACGGATCAAGAAAGAAGAGTTCTCTGAGATCATGAAGATCTGTTCCACCATTGAAGAA | 229 |
| | 2256 | |
| H3N2 | GGACGGATTAAGAAGGAAGAGTTCTCTGAGATCATGAAGATCTGTTCCACCATTGAAGAA | 230 |
| | 2280 | |
| H7N9 | GGAAGGATTAAGAAAGAAGAGTTTGCTGAGATCATGAAGATCTGTTCCACCATTGAAGAG | 231 |
| | 2256 | |
| H2N2 | GGACGGATTAAGAAAGAGGAGTTCGCTGAGATCATGAAGATCTGTTCCACCATTGAAGAG | 232 |
| | 2280 | |
| | ***.**** *****.**.***** ********************************** | |
| SEGMENT 3 | | |
| H1N1 | AATCGAGGAGTGCCTGATTAATGATCCCTGGGTTTTGCTTAATGCATCTTGGTTCAACTCC | 233 |
| | 2135 | |
| H3N2 | AATTGAGGAGTGCCTGATTAATGATCCCTGGGTTTTGCTCAATGCATCTTGGTTCAACTCC | 234 |
| | 2160 | |
| H7N9 | AATCGAGGAGTGCCTGATTAATGATCCCTGGGTTTTGCTTAATGCATCTTGGTTCAACTCC | 235 |
| | 2136 | |
| H2N2 | AATTGAGGAGTGCCTGATTAATGATCCCTGGGTTTTGCTTAATGCGTCTTGGTTCAACTCC | 236 |
| | 2160 | |
| | ******************************************.************** | |
| SEGMENT 5 | | |
| H1N1 | TTGACATGAGTAATGAAGGGTCTTATTTCTTCGGAGACAATGCAGAGGAGTATGACAGTT | 237 |
| | 1476 | |
| H3N2 | TTGATATGAGTAATGAAGGATCTTATTTCTTCGGAGACAATGCAGAAGAGTACGACAATT | 238 |
| | 1540 | |
| H7N9 | TTGACATGAATAATGAAGGATCtTATTTCTTCGGAGACAATGCAGAGGAGTATGACAATT | 239 |
| | 1486 | |
| H2N2 | TTGACATGAGTAATGAAGGATCTTATTTCTTCGGAGACAATGCAGAGGAGTACGACAATT | 240 |
| | 1477 | |
| | ********.*********.**************************.*********.** | |
| SEGMENT 7 | | |
| H1N1 | TTCTATCATCCCGICAGGCCCCCTCAAAGCCGAGATCGCGCAGAGACTGGAAAGTGTCTT | 241 |
| | 95 | |
| H3N2 | CTCTATCGTTCCATCAGGCCCCCTCAAAGCCGAGATCGCGCAGAGACTTGAAGATGTCTT | 242 |
| | 120 | |
| H7N9 | CTCTATCATTCCATCAGGCCCCCTCAAAGCCGAGATCGCACAGAGACTTGAGGATGTTTT | 243 |
| | 95 | |
| H2N2 | CTCTATCGTCCCGTCAGGCCCCCTCAAAGCCGAGATCGCACAGAGACTTGAAGATGTCTT | 244 |
| | 120 | |
| | ******.***.**************************.**********...***** | |

### Example 5: CoV Spike Modifications to Enhance Pseudotyping of Lentiviral Vectors

[0307] Coronavirus and lentivirus are both enveloped RNA viruses which encode a membrane bound Spike envelope protein which provides both host cell specificity and fusion between virus and host cell membranes during transduction. Remarkably, lentiviruses have the potential to utilize envelope proteins from other viruses, for example Influenza virus, Ebola virus, Baculovirus and Coronavirus, to provide altered host cell tropism. However, viral envelope proteins from Coronaviruses (CoVs) are not efficient for pseudotyping of lentiviral vectors without N and C-terminal modifications (FIG. 15A), likely due to the fact that these viruses are generated through different host cell secretory pathways. The data presented herein demonstrates that modification of both N- and C-termini of the Spike protein from SARS-CoV-1 is necessary for efficient transduction of pseudotyped lentiviral vectors into human cells, which also depends on the expression of the viral host receptor, ACE2 (FIG. 15B). Similarly, N- and C-terminal modifications are also required for ACE2-dependent transduction of lentiviral vectors pseudotyped with SARS-CoV-2 Spike protein (FIG. 15B). These include the addition of the Signal peptide from human CD5 and 27 amino acid trunctation of the SARS-CoV-2 cytoplasmic tail.

[0308] Pseudotyped lentiviral vectors can be used for the delivery CRISPR-Cas13 to specific therapeutic cell types targeted by infectious agents. Perhaps the most utilized viral envelope protein, VSV-G, which allows robust entry into diverse cell types in culture, independent of ACE2 expression, is less efficient for transduction of many cell types in vivo, due to the location of the VSV-G host receptor on the basal vs apical cell surface. The remarkably infectious nature of SARS-CoV-2 and its strong interaction with the ACE2 receptor, suggest that utilizing CoV Spike proteins may offer a unique ability to transduce therapeutically beneficial tissues in humans, including respiratory, vascular, renal, and cardiovascular cell types

### Generation of ACE2-HEK293T Stable Cell Lines

[0309] Stable ACE2 expressing cells were generated using transient transfection and antibiotic selection of a human ACE2 expression cassette, modified to carrying a Blasticidin resistance gene and express ACE2 with the EF1a promoter (EF1a-hACE2-Blast). To further eliminate non-ACE2 expressing cells after selection, Blasticidin-selected cells were transduced with lentivirus encoding a Puromycin antibiotic resistance gene pseudotyped with the modified SARS-CoV-2 spike envelope protein (4LV). For this approach, transduction of puromycin encoding lentivirus is only permissible to ACE2 expressing cells due to the specificity of the SARS-CoV-2 Spike protein, which allowed for subsequent stable selection with Blasticidin and Puromycin and cloned using serial dilution

[0310] The disclosures of each and every patent, patent application, and publication cited herein are hereby incorporated herein by reference in their entirety. While this invention has been disclosed with reference to specific embodiments, it is apparent that other embodiments and variations of this invention may be devised by others skilled in the art without departing from the true spirit and scope of the invention. The appended claims are intended to be construed to include all such embodiments and equivalent variations.

The application's sequence listing, which the Patent Office published only in electronic form, follows.

SEQUENCE LISTING (910 sequences)

SEQ ID NO: 1 - protein, 1089 aa, Artificial Sequence
  Chemically Synthesized
NIPALVENQKKYFGTYSVMAMLNAQTVLDHIQKVADIEGEQNENNENLWFHPVMSHLYNAKNGYDKQPEKTMFIIERLQSYFPFLKIMAENQREYSNGKYKQNRVEVNSNDIFEVLKRAFGVLKMYRDLTNHYKTYEEKLNDGCEFLTSTEQPLSGMINNYYTVALRNMNERYGYKTEDLAFIQDKRFKFVKDAYGKKKSQVNTGFFLSLQDYNGDTQKKLHLSGVGIALLICLFLDKQYINIFLSRLPIFSSYNAQSEERRIIIRSFGINSIKLPKDRIHSEKSNKSVAMDMLNEVKRCPDELFTTLSAEKQSRFRIISDDHNEVLMKRSSDRFVPLLLQYIDYGKLFDHIRFHVNMGKLRYLLKADKTCIDGQTRVRVIEQPLNGFGRLEEAETMRKQENGTFGNSGIRIRDFENMKRDDANPANYPYIVDTYTHYILENNKVEMFINDKEDSAPLLPVIEDDRYVVKTIPSCRMSTLEIPAMAFHMFLFGSKKTEKLIVDVHNRYKRLFQAMQKEEVTAENIASFGIAESDLPQKILDLISGNAHGKDVDAFIRLTVDDMLTDTERRIKRFKDDRKSIRSADNKMGKRGFKQISTGKLADFLAKDIVLFQPSVNDGENKITGLNYRIMQSAIAVYDSGDDYEAKQQFKLMFEKARLIGKGTTEPHPFLYKVFARSIPANAVEFYERYLIERKFYLTGLSNEIKKGNRVDVPFIRRDQNKWKTPAMKTLGRIYSEDLPVELPRQMFDNEIKSHLKSLPQMEGIDFNNANVTYLIAEYMKRVLDDDFQTFYQWNRNYRYMDMLKGEYDRKGSLQHCFTSVEEREGLWKERASRTERYRKQASNKIRSNRQMRNASSEEIETILDKRLSNSRNEYQKSEKVIRRYRVQDALLFLLAKKTLTELADFDGERFKLKEIMPDAEKGILSEIMPMSFTFEKGGKKYTITSEGMKLKNYGDFFVLASDKRIGNLLELVGSDIVSKEDIMEEFNKYDQCRPEISSIVFNLEKWAFDTYPELSARVDREEKVDFKSILKILLNNKNINKEQSDILRKIRNAFDHNNYPDKGVVEIKALPEIAMSIKKAFGEYAIMK

SEQ ID NO: 2 - protein, 982 aa, Artificial Sequence
  Chemically Synthesized
NIPALVENQKKYFGTYSVMAMLNAQTVLDHIQKVADIEGEQNENNENLWFHPVMSHLYNAKNGYDKQPEKTMFIIERLQSYFPFLKIMAENQREYSNGKYKQNRVEVNSNDIFEVLKRAFGVLKMYRDLTNHYKTYEEKLNDGCEFLTSTEQPLSGMINNYYTVALRNMNERYGYKTEDLAFIQDKRFKFVKDAYGKKKSQVNTGFFLSLQDYNGDTQKKLHLSGVGIALLICLFLDKQYINIFLSRLPIFSSYNAQSEERRIIIRSFGINSIKLPKDRIHSEKSNKSVAMDMLNEVKRCPDELFTTLSAEKQSRFRIISDDHNEVLMKRSSDRFVPLLLQYIDYGKLFDHIRFHVNMGKLRYLLKADKTCIDGQTRVRVIEQPLNGFGRLEEAETMRKQENGTFGNSGIRIRDFENMKRDDANPANYPYIVDTYTHYILENNKVEMFINDKEDSAPLLPVIEDDRYVVKTIPSCRMSTLEIPAMAFHMFLFGSKKTEKLIVDVHNRYKRLFQAMQKEEVTAENIASFGIAESDLPQKILDLISGNAHGKDVDAFIRLTVDDMLTDTERRIKRFKDDRKSIRSADNKMGKRGFKQISTGKLADFLAKDIVLFQPSVNDGENKITGLNYRIMQSAIAVYDSGDDYEAKQQFKLMFEKARLIGKGTTEPHPFLYKVFARSIPANAVEFYERYLIERKFYLTGLSNEIKKGNRVDVPFIRRDQNKWKTPAMKTLGRIYSEDLPVELPRQMFDNEIKSHLKSLPQMEGIDFNNANVTYLIAEYMKRVLDDDFQTFYQWNRNYRYMDMLKGEYDRKGSLQHCFTSVEEREGLWKERASRTERYRKQASNKIRSNRQMRNASSEEIETILDKRLSNSRNEYQKSEKVIRRYRVQDALLFLLAKKTLTELADFDGERFKLKEIMPDAEKGILSEIMPMSFTFEKGGKKYTITSEGMKLKNYGDFFVLASDKRIGNLLELVGSDIVSKED

SEQ ID NO: 3 - protein, 953 aa, Artificial Sequence
  Chemically Synthesized
MSNEIGAFREHQFAYAPGNEKQEEATFATYFNLALSNVEGMMFGEVESNPDKIEKSLDTLPPAILRQIASFIWLSKEDHPDKAYSTEEVKVIVTDLVRRLCFYRNYFSHCFYLDTQYFYSDELVDTTAIGEKLPYNFHHFITNRLFRYSLPEITLFRWNEGERKYEILRDGLIFFCCLFLKRGQAERFLNELRFFKRTDEEGRIKRTIFTKYCTRESHKHIGIEEQDFLIFQDIIGDLNRVPKVCDGVVDLSKENERYIKNRETSNESDENKARYRLLIREKDKFPYYLMRYIVDFGVLPCITFKQNDYSTKEGRGQFHYQDAAVAQEERCYNFVVRNGNVYYSYMPQAQNVVRISELQGTISVEELRNMVYASINGKDVNKSVEQYLYHLHLLYEKILTISGQTIKEGRVDVEDYRPLLDKLLLRPASNGEELRRELRKLLPKRVCDLLSNRFDCSEGVSAVEKRLKAILLRHEQLLLSQNPALHIDKIKSVIDYLYLFFSDDEKFRQQPTEKAHRGLKDEEFQMYHYLVGDYDSHPLALWKELEASGRLKPEMRKLTSATSLHGLYMLCLKGTVEWCRKQLMSIGKGTAKVEAIADRVGLKLYDKLKEYTPEQLEREVKLVVMHGYAAAATPKPKAQAAIPSKLTELRFYSFLGKREMSFAAFIRQDKKAQKLWLRNFYTVENIKTLQKRQAAADAACKKLYNLVGEVERVHTNDKVLVLVAQRYRERLLNVGSKCAVTLDNPERQQKLADVYEVQNAWLSIRFDDLDFTLTHVNLSNLRKAYNLIPRKHILAFKEYLDNRVKQKLCEECRNVRRKEDLCTCCSPRYSNLTSWLKENHSESSIEREAATMMLLDVERKLLSFLLDERRKAIIEYGKFIPFSALVKECRLADAGLCGIRNDVLHDNVISYADAIGKLSAYFPKEASEAVEYIRRTKEVREQRREELMANSSQ

SEQ ID NO: 4 - protein, 1111 aa, Artificial Sequence
  Chemically Synthesized
MKSGRREKAKSNKSSIVRVIISNFDDKQVKEIKVLYTKQGGIDVIKFKSTEKDEKGRMKFNFDCAYNRLEEEEFNSFGGKGKQSFFVTTNEDLTELHVTKRHKTTGEIIKDYTIQGKYTPIKQDRTKVTVSITDNKDHFDSNDLGDKIRLSRSLTQYTNRILLDADVMKNYREIVCSDSEKVDETINIDSQEIYKINRFLSYRSNMIIYYQMINNFLLHYDGEEDKGGNDSINLINEIWKYENKKNDEKEKIIERSYKSIEKSINQYILNHNTEVESGDKEKKIDISEERIKEDLKKTFILFSRLRHYMVHYNYKFYENLYSGKNFIIYNKDKSKSRRFSELLDLNIFKELSKIKLVKNRAVSNYLDKKTTIHVLNKNINAIKLLDIYRDICETKNGFNNFINNMMTISGEEDKEYKEMVTKHFNENMNKLSIYLENFKKHSDFKTNNKKKETYNLLKQELDEQKKLRLWFNAPYVYDIHSSKKYKELYVERKKYVDIHSKLIEAGINNDNKKKLNEINVKLCELNTEMKEMTKLNSKYRLQYKLQLAFGFILEEFNLDIDKFVSAFDKDNNLTISKFMEKRETYLSKSLDRRDNRFKKLIKDYKFRDTEDIFCSDRENNLVKLYILMYILLPVEIRGDFLGFVKKNYYDLKHVDFIDKRNNDNKDTFFHDLRLFEKNVKRLEVTSYSLSDGFLGKKSREKFGKELEKFIYKNVSIALPTNIDIKEFNKSLVLPMMKNYQIIFKLLNDIEISALFLIAKKEGNEGSITFKKVIDKVRKEDMNGNINFSQVMKMALNEKVNCQIRNSIAHINMKQLYIEPLNIYINNNQNKKTISEQMEEIIDICITKGLTGKELNKNIINDYYMKKEKLVFNLKLRKRNNLVSIDAQQKNMKEKSILNKYDLNYKDENLNIKEIILKVNDLNNKQKLLKETTEGESNYKNALSKDILLLNGIIRKNINFKIKEMILGIIQQNEYRYVNINIYDKIRKEDHNIDLKINNKYIEISCYENKSNESTDERINFKIKYMDLKVKNELLVPSCYEDIYIKKKIDLEIRYIENCKVVYIDIYYKKYNINLEFDGKTLFVKFNKDVKKNNQKVNLESNYIQNIKFIVS

SEQ ID NO: 5 - protein, 1276 aa, Artificial Sequence
  Chemically Synthesized
MKISKVDHVKSGIDQKLSSQRGMLYKQPQKKYEGKQLEEHVRNLSRKAKALYQVFPVSGNSKMEKELQIINSFIKNILLRLDSGKTSEEIVGYINTYSVASQISGDHIQELVDQHLKESLRKYTCVGDKRIYVPDIIVALLKSKFNSETLQYDNSELKILIDFIREDYLKEKQIKQIVHSIENNSTPLRIAEINGQKRLIPANVDNPKKSYIFEFLKEYAQSDPKGQESLLQHMRYLILLYLYGPDKITDDYCEEIEAWNFGSIVMDNEQLFSEEASMLIQDRIYVNQQIEEGRQSKDTAKVKKNKSKYRMLGDKIEHSINESVVKHYQEACKAVEEKDIPWIKYISDHVMSVYSSKNRVDLDKLSLPYLAKNTWNTWISFIAMKYVDMGKGVYHFAMSDVDKVGKQDNLIIGQIDPKFSDGISSFDYERIKAEDDLHRSMSGYIAFAVNNFARAICSDEFRKKNRKEDVLTVGLDEIPLYDNVKRKLLQYFGGASNWDDSIIDIIDDKDLVACIKENLYVARNVNFHFAGSEKVQKKQDDILEEIVRKETRDIGKHYRKVFYSNNVAVFYCDEDIIKLMNHLYQREKPYQAQIPSYNKVISKTYLPDLIFMLLKGKNRTKISDPSIMNMFRGTFYFLLKEIYYNDFLQASNLKEMFCEGLKNNVKNKKSEKPYQNFMRRFEELENMGMDFGEICQQIMTDYEQQNKQKKKTATAVMSEKDKKIRTLDNDTQKYKHFRTLLYIGLREAFIIYLKDEKNKEWYEFLREPVKREQPEEKEFVNKWKLNQYSDCSELILKDSLAAAWYVVAHFINQAQLNHLIGDIKNYIQFISDIDRRAKSTGNPVSESTEIQIERYRKILRVLEFAKFFCGQITNVLTDYYQDENDFSTHVGHYVKFEKKNMEPAHALQAFSNSLYACGKEKKKAGFYYDGMNPIVNRNITLASMYGNKKLLENAMNPVTEQDIRKYYSLMAELDSVLKNGAVCKSEDEQKNLRHFQNLKNRIELVDVLTLSELVNDLVAQLIGWVYIRERDMMYLQLGLHYIKLYFTDSVAEDSYLRTLDLEEGSIADGAVLYQIASLYSFNLPMYVKPNKSSVYCKKHVNSVATKFDIFEKEYCNGDETVIENGLRLFENINLHKDMVKFRDYLAHFKYFAKLDESILELYSKAYDFFFSYNIKLKKSVSYVLTNVLLSYFINAKLSFSTYKSSGNKTVQHRTTKISVVAQTDYFTYKLRSIVKNKNGVESIENDDRRCEVVNIAARDKEFVDEVCNVINYNSDK

SEQ ID NO: 6 - protein, 1224 aa, Artificial Sequence
  Chemically Synthesized
MENKTSLGNNIYYNPFKPQDKSYFAGYFNAAMENTDSVFRELGKRLKGKEYTSENFFDAIFKENISLVEYERYVKLLSDYFPMARLLDKKEVPIKERKENFKKNFKGIIKAVRDLRNFYTHKEHGEVEITDEIFGVLDEMLKSTVLTVKKKKVKTDKTKEILKKSIEKQLDILCQKKLEYLRDTARKIEEKRRNQRERGEKELVAPFKYSDKRDDLIAAIYNDAFDVYIDKKKDSLKESSKAKYNTKSDPQQEEGDLKIPISKNGVVFLLSLFLTKQEIHAFKSKIAGFKATVIDEATVSEATVSHGKNSICFMATHEIFSHLAYKKLKRKVRTAEINYGEAENAEQLSVYAKETLMMQMLDELSKVPDVVYQNLSEDVQKTFIEDWNEYLKENNGDVGTMEEEQVIHPVIRKRYEDKFNYFAIRFLDEFAQFPTLRFQVHLGNYLHDSRPKENLISDRRIKEKITVFGRLSELEHKKALFIKNTETNEDREHYWEIFPNPNYDFPKENISVNDKDFPIAGSILDREKQPVAGKIGIKVKLLNQQYVSEVDKAVKAHQLKQRKASKPSIQNIIEEIVPINESNPKEAIVFGGQPTAYLSMNDIHSILYEFFDKWEKKKEKLEKKGEKELRKEIGKELEKKIVGKIQAQIQQIIDKDTNAKILKPYQDGNSTAIDKEKLIKDLKQEQNILQKLKDEQTVREKEYNDFIAYQDKNREINKVRDRNHKQYLKDNLKRKYPEAPARKEVLYYREKGKVAVWLANDIKRFMPTDFKNEWKGEQHSLLQKSLAYYEQCKEELKNLLPEKVFQHLPFKLGGYFQQKYLYQFYTCYLDKRLEYISGLVQQAENFKSENKVFKKVENECFKFLKKQNYTHKELDARVQSILGYPIFLERGFMDEKPTIIKGKTFKGNEALFADWFRYYKEYQNFQTFYDTENYPLVELEKKQADRKRKTKIYQQKKNDVFTLLMAKHIFKSVFKQDSIDQFSLEDLYQSREERLGNQERARQTGERNTNYIWNKTVDLKLCDGKITVENVKLKNVGDFIKYEYDQRVQAFLKYEENIEWQAFLIKESKEEENYPYVVEREIEQYEKVRREELLKEVHLIEEYILEKVKDKEILKKGDNQNFKYYILNGLLKQLKNEDVESYKVFNLNTEPEDVNINQLKQEATDLEQKAFVLTYIRNKFAHNQLPKKEFWDYCQEKYGKIEKEKTYAEYFAEVFKKEKEALIK

SEQ ID NO: 7 - protein, 1385 aa, Artificial Sequence
  Chemically Synthesized
MKFSKVDHTRSAVGIQKATDSVHGMLYTDPKKQEVNDLDKRFDQLNVKAKRLYNVFNQSKAEEDDDEKRFGKVVKKLNRELKDLLFHREVSRYNSIGNAKYNYYGIKSNPEEIVSNLGMVESLKGERDPQKVISKLLLYYLRKGLKPGTDGLRMILEASCGLRKLSGDEKELKVFLQTLDEDFEKKTFKKNLIRSIENQNMAVQPSNEGDPIIGITQGRFNSQKNEEKSAIERMMSMYADLNEDHREDVLRKLRRLNVLYFNVDTEKTEEPTLPGEVDTNPVFEVWHDHEKGKENDRQFATFAKILTEDRETRKKEKLAVKEALNDLKSAIRDHNIMAYRCSIKVTEQDKDGLFFEDQRINRFWIHHIESAVERILASINPEKLYKLRIGYLGEKVWKDLLNYLSIKYIAVGKAVFHFAMEDLGKTGQDIELGKLSNSVSGGLTSFDYEQIRADETLQRQLSVEVAFAANNLFRAVVGQTGKKIEQSKSEENEEDFLLWKAEKIAESIKKEGEGNTLKSILQFFGGASSWDLNHFCAAYGNESSALGYETKFADDLRKAIYSLRNETFHFTTLNKGSFDWNAKLIGDMFSHEAATGIAVERTRFYSNNLPMFYRESDLKRIMDHLYNTYHPRASQVPSFNSVFVRKNFRLFLSNTLNTNTSFDTEVYQKWESGVYYLFKEIYYNSFLPSGDAHHLFFEGLRRIRKEADNLPIVGKEAKKRNAVQDFGRRCDELKNLSLSAICQMIMTEYNEQNNGNRKVKSTREDKRKPDIFQHYKMLLLRTLQEAFAIYIRREEFKFIFDLPKTLYVMKPVEEFLPNWKSGMFDSLVERVKQSPDLQRWYVLCKFLNGRLLNQLSGVIRSYIQFAGDIQRRAKANHNRLYMDNTQRVEYYSNVLEVVDFCIKGTSRFSNVFSDYFRDEDAYADYLDNYLQFKDEKIAEVSSFAALKTFCNEEEVKAGIYMDGENPVMQRNIVMAKLFGPDEVLKNVVPKVTREEIEEYYQLEKQIAPYRQNGYCKSEEDQKKLLRFQRIKNRVEFQTITEFSEIINELLGQLISWSFLRERDLLYFQLGFHYLCLHNDTEKPAEYKEISREDGTVIRNAILHQVAAMYVGGLPVYTLADKKLAAFEKGEADCKLSISKDTAGAGKKIKDFFRYSKYVLIKDRMLTDQNQKYTIYLAGLELFENTDEHDNITDVRKYVDHFKYYATSDENAMSILDLYSEIHDRFFTYDMKYQKNVANMLENILLRHFVLIRPEFFTGSKKVGEGKKITCKARAQIEIAENGMRSEDFTYKLSDGKKNISTCMIAARDQKYLNTVARLLYYPHEAKKSIVDTREKKNNKKTNRGDGTFNKQKGTARKEKDNGPREFNDTGFSNTPFAGFDPFRNS

SEQ ID NO: 8 - protein, 1199 aa, Artificial Sequence
  Chemically Synthesized
MKNIQRLGKGNEFSPFKKEDKFYFGGFLNLANNNIEDFFKEIITRFGIVITDENKKPKETFGEKILNEIFKKDISIVDYEKWVNIFADYFPFTKYLSLYLEEMQFKNRVICFRDVMKELLKTVEALRNFYTHYDHEPIKIEDRVFYFLDKVLLDVSLTVKNKYLKTDKTKEFLNQHIGEELKELCKQRKDYLVGKGKRIDKESEIINGIYNNAFKDFICKREKQDDKENHNSVEKILCNKEPQNKKQKSSATVWELCSKSSSKYTEKSFPNRENDKHCLEVPISQKGIVFLLSFFLNKGEIYALTSNIKGFKAKITKEEPVTYDKNSIRYMATHRMFSFLAYKGLKRKIRTSEINYNEDGQASSTYEKETLMLQMLDELNKVPDVVYQNLSEDVQKTFIEDWNEYLKENNGDVGTMEEEQVIHPVIRKRYEDKFNYFAIRFLDEFAQFPTLRFQVHLGNYLCDKRTKQICDTTTEREVKKKITVFGRLSELENKKAIFLNEREEIKGWEVFPNPSYDFPKENISVNYKDFPIVGSILDREKQPVSNKIGIRVKIADELQREIDKAIKEKKLRNPKNRKANQDEKQKERLVNEIVSTNSNEQGEPVVFIGQPTAYLSMNDIHSVLYEFLINKISGEALETKIVEKIETQIKQIIGKDATTKILKPYTNANSNSINREKLLRDLEQEQQILKTLLEEQQQREKDKKDKKSKRKHELYPSEKGKVAVWLANDIKRFMPKAFKEQWRGYHHSLLQKYLAYYEQSKEELKNLLPKEVFKHFPFKLKGYFQQQYLNQFYTDYLKRRLSYVNELLLNIQNFKNDKDALKATEKECFKFFRKQNYIINPINIQIQSILVYPIFLKRGFLDEKPTMIDREKFKENKDTELADWFMHYKNYKEDNYQKFYAYPLEKVEEKEKFKRNKQINKQKKNDVYTLMMVEYIIQKIFGDKFVEENPLVLKGIFQSKAERQQNNTHAATTQERNLNGILNQPKDIKIQGKITVKGVKLKDIGNFRKYEIDQRVNTFLDYEPRKEWMAYLPNDWKEKEKQGQLPPNNVIDRQISKYETVRSKILLKDVQELEKIISDEIKEEHRHDLKQGKYYNFKYYILNGLLRQLKNENVENYKVFKLNTNPEKVNITQLKQEATDLEQKAFVLTYIRNKFAHNQLPKKEFWDYCQEKYGKIEKEKTYAEYFAEVFKREKEALIK

SEQ ID NO: 9 - protein, 1164 aa, Artificial Sequence
  Chemically Synthesized
MRMTKVKINGSPVSMNRSKLNGHLVWNGTTNTVNILTKKEQSFAASFLNKTLVKADQVKGYKVLAENIFIIFEQLEKSNSEKPSVYLNNIRRLKEAGLKRFFKSKYHEEIKYTSEKNQSVPTKLNLIPLFFNAVDRIQEDKFDEKNWSYFCKEMSPYLDYKKSYLNRKKEILANSIQQNRGFSMPTAEEPNLLSKRKQLFQQWAMKFQESPLIQQNNFAVEQFNKEFANKINELAAVYNVDELCTAITEKLMNFDKDKSNKTRNFEIKKLWKQHPHNKDKALIKLFNQEGNEALNQFNIELGKYFEHYFPKTGKKESAESYYLNPQTIIKTVGYQLRNAFVQYLLQVGKLHQYNKGVLDSQTLQEIGMYEGFQTKFMDACVFASSSLRNIIQATTNEDILTREKFKKELEKNVELKHDLFFKTEIVEERDENPAKKIAMTPNELDLWAIRGAVQRVRNQIFHQQINKRHEPNQLKVGSFENGDLGNVSYQKTIYQKLFDAEIKDIEIYFAEKIKSSGALEQYSMKDLEKLFSNKELTLSLGGQVVAFAPSYKKLYKQGYFYQNEKTIELEQFTDYDFSNDVFKANYYLIKLIYHYVFLPQFSQANNKLFKDTVHYVIQQNKELNTTEKDKKNNKKIRKYAFEQVKLMKNESPEKYMQYLQREMQEERTIKEAKKTNEEKPNYNFEKLLIQIFIKGFDTFLRNFDLNLNPAEELVGTVKEKAEGLRKRKERIAKILNVDEQIKTGDEEIAFWIFAKLLDARHLSELRNEMIKFKQSSVKKGLIKNGDLIEQMQPILELCILSNDSESMEKESFDKIEVFLEKVELAKNEPYMQEDKLTPVKFRFMKQLEKYQTRNFIENLVIENPEFKVSEKIVLNWHEEKEKIADLVDKRTKLHEEWASKAREIEEYNEKIKKNKSKKLDKPAEFAKFAEYKIICEAIENFNRLDHKVRLTYLKNLHYLMIDLMGRMVGFSVLFERDFVYMGRSYSALKKQSIYLNDYDTFANIRDWEVNENKHLFGTSSSDLTFQETAEFKNLKKPMENQLKALLGVTNHSFEIRNNIAHLHVLRNDGKGEGVSLLSCMNDLRKLMSYDRKLKNAVTKAIIKILDKHGMILKLTNNDHTKPFEIESLKPKKIIHLEKSNHSFPMDQVSQEYCDLVKKMLVFTN

SEQ ID NO: 10 - protein, 1175 aa, Artificial Sequence
  Chemically Synthesized
MRITKVKIKLDNKLYQVTMQKEEKYGTLKLNEESRKSTAEILRLKKASFNKSFHSKTINSQKENKNATIKKNGDYISQIFEKLVGVDTNKNIRKPKMSLTDLKDLPKKDLALFIKRKFKNDDIVEIKNLDLISLFYNALQKVPGEHFTDESWADFCQEMMPYREYKNKFIERKIILLANSIEQNKGFSINPETFSKRKRVLHQWAIEVQERGDFSILDEKLSKLAEIYNFKKMCKRVQDELNDLEKSMKKGKNPEKEKEAYKKQKNFKIKTIWKDYPYKTHIGLIEKIKENEELNQFNIEIGKYFEHYFPIKKERCTEDEPYYLNSETIATTVNYQLKNALISYLMQIGKYKQFGLENQVLDSKKLQEIGIYEGFQTKFMDACVFATSSLKNIIEPMRSGDILGKREFKEAIATSSFVNYHHFFPYFPFELKGMKDRESELIPFGEQTEAKQMQNIWALRGSVQQIRNEIFHSFDKNQKFNLPQLDKSNFEFDASENSTGKSQSYIETDYKFLFEAEKNQLEQFFIERIKSSGALEYYPLKSLEKLFAKKEMKFSLGSQVVAFAPSYKKLVKKGHSYQTATEGTANYLGLSYYNRYELKEESFQAQYYLLKLIYQYVFLPNFSQGNSPAFRETVKAILRINKDEARKKMKKNKKFLRKYAFEQVREMEFKETPDQYMSYLQSEMREEKVRKAEKNDKGFEKNITMNFEKLLMQIFVKGFDVFLTTFAGKELLLSSEEKVIKETEISLSKKINEREKTLKASIQVEHQLVATNSAISYWLFCKLLDSRHLNELRNEMIKFKQSRIKFNHTQHAELIQNLLPIVELTILSNDYDEKNDSQNVDVSAYFEDKSLYETAPYVQTDDRTRVSFRPILKLEKYHTKSLIEALLKDNPQFRVAATDIQEWMHKREEIGELVEKRKNLHTEWAEGQQTLGAEKREEYRDYCKKIDRFNWKANKVTLTYLSQLHYLITDLLGRMVGFSALFERDLVYFSRSFSELGGETYHISDYKNLSGVLRLNAEVKPIKIKNIKVIDNEENPYKGNEPEVKPFLDRLHAYLENVIGIKAVHGKIRNQTAHLSVLQLELSMIESMNNLRDLMAYDRKLKNAVTKSMIKILDKHGMILKLKIDENHKNFEIESLIPKEIIHLKDKAIKTNQVSEEYCQLVLALLTTNPGNQLN

SEQ ID NO: 11 - protein, 1373 aa, Artificial Sequence
  Chemically Synthesized
MKISKESHKRTAVAVMEDRVGGVVYVPGGSGIDLSNNLKKRSMDTKSLYNVFNQIQAGTAPSEYEWKDYLSEAENKKREAQKMIQKANYELRRECEDYAKKANLAVSRIIFSKKPKKIFSDDDIISHMKKQRLSKFKGRMEDFVLIALRKSLVVSTYNQEVFDSRKAATVFLKNIGKKNISADDERQIKQLMALIREDYDKWNPDKDSSDKKESSGTKVIRSIEHQNMVIQPEKNKLSLSKISNVGKKTKTKQKEKAGLDAFLKEYAQIDENSRMEYLKKLRRLLDTYFAAPSSYIKGAAVSLPENINFSSELNVWERHEAAKKVNINFVEIPESLLNAEQNNNKINKVEQEHSLEQLRTDIRRRNITCYHFANALAADERYHTLFFENMAMNQFWIHHMENAVERILKKCNVGTLFKLRIGYLSEKVWKDMLNLLSIKYIALGKAVYHFALDDIWKADIWKDASDKNSGKINDLTLKGISSFDYEMVKAQEDLQREMAVGVAFSTNNLARVTCKMDDLSDAESDFLLWNKEAIRRHVKYTEKGEILSAILQFFGGRSLWDESLFEKAYSDSNYELKFLDDLKRAIYAARNETFHFKTAAIDGGSWNTRLFGSLFEKEAGLCLNVEKNKFYSNNLVLFYKQEDLRVFLDKLYGKECSRAAQIPSYNTILPRKSFSDFMKQLLGLKEPVYGSAILDQWYSACYYLFKEVYYNLFLQDSSAKALFEKAVKALKGADKKQEKAVESFRKRYWEISKNASLAEICQSYITEYNQQNNKERKVRSANDGMFNEPIYQHYKMLLKEALKMAFASYIKNDKELKFVYKPTEKLFEVSQDNFLPNWNSEKYNTLISEVKNSPDLQKWYIVGKFMNARMLNLLLGSMRSYLQYVSDIQKRAAGLGENQLHLSAENVGQVKKWIQVLEVCLLLSVRISDKFTDYFKDEEEYASYLKEYVDFEDSAMPSDYSALLAFSNEGKIDLYVDASNPKVNRNIIQAKLYAPDMVLKKVVKKISQDECKEFNEKKEQIMQFKNKGDEVSWEEQQKILEYQKLKNRVELRDLSEYGELINELLGQLINWSYLRERDLLYFQLGFHYSCLMNESKKPDAYKTIRRGTVSIENAVLYQIIAMYINGFPVYAPEKGELKPQCKTGSAGQKIRAFCQWASMVEKKKYELYNAGLELFEVVKEHDNIIDLRNKIDHFKYYQGNDSILALYGEIFDRFFTYDMKYRNNVLNHLQNILLRHNVIIKPIISKDKKEVGRGKMKDRAAFLLEEVSSDRFTYKVKEGERKIDAKNRLYLETVRDILYFPNRAVNDKGEDVIICSKKAQDLNEKKADRDKNHDKSKDTNQKKEGKNQEEKSENKEPYSDRMTWKPFAGIKLE

SEQ ID NO: 12 - protein, 1344 aa, Artificial Sequence
  Chemically Synthesized
MLRRDKEVKKLYNVFNQIQVGTKPKKWNNDEKLSPEENERRAQQKNIKMKNYKWREACSKYVESSQRIINDVIFYSYRKAKNKLRYMRKNEDILKKMQEAEKLSKFSGGKLEDFVAYTLRKSLVVSKYDTQEFDSLAAMVVFLECIGKNNISDHEREIVCKLLELIRKDFSKLDPNVKGSQGANIVRSVRNQNMIVQPQGDRFLFPQVYAKENETVTNKNVEKEGLNEFLLNYANLDDEKRAESLRKLRRILDVYFSAPNHYEKDMDITLSDNIEKEKFNVWEKHECGKKETGLFVDIPDVLMEAEAENIKLDAVVEKRERKVLNDRVRKQNIICYRYTRAVVEKYNSNEPLFFENNAINQYWIHHIENAVERILKNCKAGKLFKLRKGYLAEKVWKDAINLISIKYIALGKAVYNFALDDIWKDKKNKELGIVDERIRNGITSFDYEMIKAHENLQRELAVDIAFSVNNLARAVCDMSNLGNKESDFLLWKRNDIADKLKNKDDMASVSAVLQFFGGKSSWDINIFKDAYKGKKKYNYEVRFIDDLRKAIYCARNENFHFKTALVNDEKWNTELFGKIFERETEFCLNVEKDRFYSNNLYMFYQVSELRNMLDHLYSRSVSRAAQVPSYNSVIVRTAFPEYITNVLGYQKPSYDADTLGKWYSACYYLLKEIYYNSFLQSDRALQLFEKSVKTLSWDDKKQQRAVDNFKDHFSDIKSACTSLAQVCQIYMTEYNQQNNQIKKVRSSNDSIFDQPVYQHYKVLLKKAIANAFADYLKNNKDLFGFIGKPFKANEIREIDKEQFLPDWTSRKYEALCIEVSGSQELQKWYIVGKFLNARSLNLMVGSMRSYIQYVTDIKRRAASIGNELHVSVHDVEKVEKWVQVIEVCSLLASRTSNQFEDYFNDKDDYARYLKSYVDFSNVDMPSEYSALVDFSNEEQSDLYVDPKNPKVNRNIVHSKLFAADHILRDIVEPVSKDNIEEFYSQKAEIAYCKIKGKEITAEEQKAVLKYQKLKNRVELRDIVEYGEIINELLGQLINWSFMRERDLLYFQLGFHYDCLRNDSKKPEGYKNIKVDENSIKDAILYQIIGMYVNGVTVYAPEKDGDKLKEQCVKGGVGVKVSAFHRYSKYLGLNEKTLYNAGLEIFEVVAEHEDIINLRNGIDHFKYYLGDYRSMLSIYSEVFDRFFTYDIKYQKNVLNLLQNILLRHNVIVEPILESGFKTIGEQTKPGAKLSIRSIKSDTFQYKVKGGTLITDAKDERYLETIRKILYYAENEEDNLKKSVVVTNADKYEKNKESDDQNKQKEKKNKDNKGKKNEETKSDAEKNNNERLSYNPFANLNFKLSN

SEQ ID NO: 13 - protein, 954 aa, Artificial Sequence
  Chemically Synthesized
MGKKIHARDLREQRKTDRTEKFADQNKKREAERAVPKKDAAVSVKSVSSVSSKKDNVTKSMAKAAGVKSVFAVGNTVYMTSFGRGNDAVLEQKIVDTSHEPLNIDDPAYQLNVVTMNGYSVTGHRGETVSAVTDNPLRRFNGRKKDEPEQSVPTDMLCLKPTLEKKFFGKEFDDNIHIQLIYNILDIEKILAVYSTNAIYALNNMSADENIENSDFFMKRTTDETFDDFEKKKESTNSREKADFDAFEKFIGNYRLAYFADAFYVNKKNPKGKAKNVLREDKELYSVLTLIGKLRHWCVHSEEGRAEFWLYKLDELKDDFKNVLDVVYNRPVEEINNRFIENNKVNIQILGSVYKNTDIAELVRSYYEFLITKKYKNMGFSIKKLRESMLEGKGYADKEYDSVRNKLYQMTDFILYTGYINEDSDRADDLVNTLRSSLKEDDKTTVYCKEADYLWKKYRESIREVADALDGDNIKKLSKSNIEIQEDKLRKCFISYADSVSEFTKLIYLLTRFLSGKEINDLVTTLINKFDNIRSFLEIMDELGLDRTFTAEYSFFEGSTKYLAELVELNSFVKSCSFDINAKRTMYRDALDILGIESDKTEEDIEKMIDNILQIDANGDKKLKKNNGLRNFIASNVIDSNRFKYLVRYGNPKKIRETAKCKPAVRFVLNEIPDAQIERYYEACCPKNTALCSANKRREKLADMIAEIKFENFSDAGNYQKANVTSRTSEAEIKRKNQAIIRLYLTVMYIMLKNLVNVNARYVIAFHCVERDTKLYAESGLEVGNIEKNKTNLTMAVMGVKLENGIIKTEFDKSFAENAANRYLRNARWYKLILDNLKKSERAVVNEFRNTVCHLNAIRNININIKEIKEVENYFALYHYLIQKHLENRFADKKVERDTGDFISKLEEHKTYCKDFVKAYCTPFGYNLVRYKNLTIDGLFDKNYPGKDDSDEQK

SEQ ID NO: 14 - protein, 1150 aa, Artificial Sequence
  Chemically Synthesized
MENLNKILDKENEICISKIFNTKGIAAPITEKALDNIKSKQKNDLNKEARLHYFSIGHSFKQIDTKKVFDYVLIEELKDEKPLKFITLQKDFFTKEFSIKLQKLINSIRNINNHYVHNFNDINLNKIDSNVFHFLKESFELAIIEKYYKVNKKYPLDNEIVLFLKELFIKDENTALLNYFTNLSKDEAIEYILTFTITENKIWNINNEHNILNIEKGKYLTFEAMLFLITIFLYKNEANHLLPKLYDFKNNKSKQELFTFFSKKFTSQDIDAEEGHLIKFRDMIQYLNHYPTAWNNDLKLESENKNKIMTTKLIDSIIEFELNSNYPSFATDIQFKKEAKAFLFASNKKRNQTSFSNKSYNEEIRHNPHIKQYRDEIASALTPISFNVKEDKFKIFVKKHVLEEYFPNSIGYEKFLEYNDFTEKEKEDFGLKLYSNPKTNKLIERIDNHKLVKSHGRNQDRFMDFSMRFLAENNYFGKDAFFKCYKFYDTQEQDEFLQSNENNDDVKFHKGKVTTYIKYEEHLKNYSYWDCPFVEENNSMSVKISIGSEEKILKIQRNLMIYFLENALYNENVENQGYKLVNNYYRELKKDVEESIASLDLIKSNPDFKSKYKKILPKRLLHNYAPAKQDKAPENAFETLLKKADFREEQYKKLLKKAEHEKNKEDFVKRNKGKQFKLHFIRKACQMMYFKEKYNTLKEGNAAFEKKDPVIEKRKNKEHEFGHHKNLNITREEFNDYCKWMFAFNGNDSYKKYLRDLFSEKHFFDNQEYKNLFESSVNLEAFYAKTKELFKKWIETNKPTNNENRYTLENYKNLILQKQVFINVYHFSKYLIDKNLLNSENNVIQYKSLENVEYLISDFYFQSKLSIDQYKTCGKLFNKLKSNKLEDCLLYEIAYNYIDKKNVHKIDIQKILTSKIILTINDANTPYKISVPFNKLERYTEMIAIKNQNNLKARFLIDLPLYLSKNKIKKGKDSAGYEIIIKNDLEIEDINTINNKIINDSVKFTEVLMELEKYFILKDKCILSKNYIDNSEIPSLKQFSKVWIKENENEIINYRNIACHFHLPLLETFDNLLLNVEQKFIKEELQNVSTINDLSKPQEYLILLFIKFKHNNFYLNLFNKNESKTIKNDKEVKKNRVLQKFINQVILKKK

SEQ ID NO: 15 - protein, 1110 aa, Artificial Sequence
  Chemically Synthesized
MKVRYRKQAQLDTFIIKTEIVNNDIFIKSIIEKAREKYRYSFLFDGEEKYHFKNKSSVEIVKNDIFSQTPDNMIRNYKITLKISEKNPRVVEAEIEDLMNSTILKDGRRSARREKSMTERKLIEEKVAENYSLLANCPIEEVDSIKIYKIKRFLTYRSNMLLYFASINSFLCEGIKGKDNETEEIWHLKDNDVRKEKVKENFKNKLIQSTENYNSSLKNQIEEKEKLSSKEFKKGAFYRTIIKKLQQERIKELSEKSLTEDCEKIIKLYSELRHPLMHYDYQYFENLFENKENSELTKNLNLDIFKSLPLVRKMKLNNKVNYLEDNDTLFVLQKTKKAKTLYQIYDALCEQKNGFNKFINDFFVSDGEENTVFKQIINEKFQSEMEFLEKRISESEKKNEKLKKKLDSMKAHFRNINSEDTKEAYFWDIHSSRNYKTKYNERKNLVNEYTKLLGSSKEKKLLREEITKINRQLLKLKQEMEEITKKNSLFRLEYKMKIAFGFLFCEFDGNISKFKDEFDASNQEKIIQYHKNGEKYLTSFLKEEEKEKFNLEKMQKIIQKTEEEDWLLPETKNNLFKFYLLTYLLLPYELKGDFLGFVKKHYYDIKNVDFMDENQNNIQVSQTVEKQEDYFYHKIRLFEKNTKKYEIVKYSIVPNEKLKQYFEDLGIDIKYLTGSVESGEKWLGENLGIDIKYLTVEQKSEVSEEKNKKVSLKNNGMFNKTILLFVFKYYQIAFKLFNDIELYSLFFLREKSEKPFEVFLEELKDKMIGKQLNFGQLLYVVYEVLVKNKDLDKILSKKIDYRKDKSFSPEIAYLRNFLSHLNYSKFLDNFMKINTNKSDENKEVLIPSIKIQKMIQFIEKCNLQNQIDFDFNFVNDFYMRKEKMFFIQLKQIFPDINSTEKQKKSEKEEILRKRYHLINKKNEQIKDEHEAQSQLYEKILSLQKIFSCDKNNFYRRLKEEKLLFLEKQGKKKISMKEIKDKIASDISDLLGILKKEITRDIKDKLTEKFRYCEEKLLNISFYNHQDKKKEEGIRVFLIRDKNSDNFKFESILDDGSNKIFISKNGKEITIQCCDKVLETLMIEKNTLKISSNGKIISLIPHYSYSIDVKY

SEQ ID NO: 16 - protein, 1111 aa, Artificial Sequence
  Chemically Synthesized
MEKFRRQNRSSIIKIIISNYDTKGIKELKVRYRKQAQLDTFIIKTEIVNNDIFIKSIIEKAREKYRYSFLFDGEEKYHFKNKSSVEIVKKDIFSQTPDNMIRNYKITLKISEKNPRVVEAEIEDLMNSTILKDGRRSARREKSMTERKLIEEKVAENYSLLANCPMEEVDSIKIYKIKRFLTYRSNMLLYFASINSFLCEGIKGKDNETEEIWHLKDNDVRKEKVKENFKNKLIQSTENYNSSLKNQIEEKEKLLRKESKKGAFYRTIIKKLQQERIKELSEKSLTEDCEKIIKLYSELRHPLMHYDYQYFENLFENKENSELTKNLNLDIFKSLPLVRKMKLNNKVNYLEDNDTLFVLQKTKKAKTLYQIYDALCEQKNGFNKFINDFFVSDGEENTVFKQIINEKFQSEIEFLEKRISESEKKNEKLKKKLDSMKAHFRNINSEDTKEAYFWDIHSSRNYKTKYNERKNLVNEYTELLGSSKEKKLLREEITKINRQLLKLKQEMEEITKKNSLFRLEYKMKMAFGFLFCEFDGNISRFKDEFDASNQEKIIQYHKNGEKYLTYFLKEEEKEKFNLKKLQETIQKTGEENWLLPQNKNNLFKFYLLTYLLLPYELKGDFLGFVKKHYYDIKNVDFMDENQSSKIIESKEDDFYHKIRLFEKNTKKYEIVKYSIVPDKKLKQYFKDLGIDTKYLILDQKSEVSGEKNKKVSLKNNGMFNKTILLFVFKYYQIAFKLFNDIELYSLFFLREKSGKPFEVFLKELKDKMIGKQLNFGQLLYVVYEVLVKNKDLSEILSERIDYRKDMCFSAEIADLRNFLSHLNYSKFLDNFMKINTNKSDENKEVLIPSIKIQKMIKFIEECNLQSQIDFDFNFVNDFYMRKEKMFFIQLKQIFPDINSTEKQKMNEKEEILRNRYHLTDKKNEQIKDEHEAQSQLYEKILSLQKIYSSDKNNFYGRLKEEKLLFLEKQEKKKLSMEEIKDKIAGDISDLLGILKKEITRDIKDKLTEKFRYCEEKLLNLSFYNHQDKKKEESIRVFLIRDKNSDNFKFESILDDGSNKIFISKNGKEITIQCCDKVLETLIIEKNTLKISSNGKIISLIPHYSYSIDVKY

SEQ ID NO: 17 - protein, 668 aa, Artificial Sequence
  Chemically Synthesized
MTEKKSIIFKNKSSVEIVKKDIFSQTPDNMIRNYKITLKISEKNPRVVEAEIEDLMNSTILKDGRRSARREKSMTERKLIEEKVAENYSLLANCPMEEVDSIKIYKIKRFLTYRSNMLLYFASINSFLCEGIKGKDNETEEIWHLKDNDVRKEKVKENFKNKLIQSTENYNSSLKNQIEEKEKLLRKESKKGAFYRTIIKKLQQERIKELSEKSLTEDCEKIIKLYSELRHPLMHYDYQYFENLFENKENSELTKNLNLDIFKSLPLVRKMKLNNKVNYLEDNDTLFVLQKTKKAKTLYQIYDALCEQKNGFNKFINDFFVSDGEENTVFKQIINEKFQSEMEFLEKRISESEKKNEKLKKKFDSMKAHFHNINSEDTKEAYFWDIHSSSNYKTKYNERKNLVNEYTELLGSSKEKKLLREEITQINRKLLKLKQEMEEITKKNSLFRLEYKMKIAFGFLFCEFDGNISKFKDEFDASNQEKIIQYHKNGEKYLTYFLKEEEKEKFNLEKMQKIIQKTEEEDWLLPETKNNLFKFYLLTYLLLPYELKGDFLGFVKKHYYDIKNVDFMDENQNNIQVSQTVEKQEDYFYHKIRLFEKNTKKYEIVKYSIVPNEKLKQYFEDLGIDIKYLTGSVESGEKWLGENLGIDIKYLTVEQKSEVSEEKIKKFL

SEQ ID NO: 18 - protein, 1115 aa, Artificial Sequence
  Chemically Synthesized
MEKFRRQNRNSIIKIIISNYDTKGIKELKVRYRKQAQLDTFIIKTEIVNNDIFIKSIIEKAREKYRYSFLFDGEEKYHFKNKSSVEIVKKDIFSQTPDNMIRNYKITLKISEKNPRVVEAEIEDLMNSTILKDGRRSARREKSMTERKLIEEKVAKNYSLLANCPMEEVDSIKIYKIKRFLTYRSNMLLYFASINSFLCEGIKGKDNETEEIWHLKDNDVRKEKVRENFKNKLIQSTENYNSSLKNQIEEKEKLLRKEFKKGAFYRTIIKKLQQERIKELSEKSLTEDCEKIIKLYSKLRHSLMHYDYQYFENLFENKKNDDLMKDLNLDLFKSLPLIRKMKLNNKVNYLEDGDTLFVLQKTKKAKTLYQIYDALCEQKNGFNKFINDFFVSDGEENTVFKQIINEKFQSEMEFLEKRISESEKKNEKLKKKLDSMKAHFRNINSEDTKEAYFWDIHSSRNYKTKYNERKNLVNEYTELLGSSKEKKLLREEITKINRQLLKLKQEMEEITKKNSLFRLEYKMKIAFGFLFCEFDGNISKFKDEFDASNQEKIIQYHKNGEKYLTSFLKEEEKEKFNLEKMQKIIQKTEEEDWLLPETKNNLFKFYLLTYLLLPYELKGDFLGFVKKHYYDIKNVDFIDENQNNIQVSQTVEKQEDYFYHKIRLFEKNTKKYEIVKYSIVPNEKLKQYFEDLGIDIKYLTVEQKSEVSEEKNKKVSLKNNGMFNKTILLFVFKYYQIAFKLFNDIELYSLFFLREKSGKPLEIFRKELESKMKDGYLNFGQLLYVVYEVLVKNKDLDKILSKKIDYRKDKSFSPEIAYLRNFLSHLNYSKFLDNFMKINTNKSDENKEVLIPSIKIQKMIQFIEKCNLQNQIDFDFNFVNDFYMRKEKMFFIQLKQIFPDINSTEKQKMNEKEEILRNRYHLTDKKNEQIKDEHEAQSQLYEKILSLQKIYSSDKNNFYGRLKEEKLLFLEKQGKKKLSMEEIKDKIAGDISDLLGILKKEITRDIKDKLTEKFRYCEEKLLNLSFYNHQDKKKEESIRVFLIRDKNSDNFKFESILDDGSNKIFISKNGKEITIQCCDKVLETLIIEKNTLKISSNGKIISLIPHYSYSIDVKY

SEQ ID NO: 19 - protein, 1121 aa, Artificial Sequence
  Chemically Synthesized
MGKPNRSSIIKIIISNYDNKGIKEVKVRYNKQAQLDTFLIKSELKDGKFILYSIVDKAREKYRYSFEIDKTNINKNEILIIKKDIYSNKEDKVIRKYILSFEVSEKNDRTIVTKIKDCLETQKKEKFERENTRRLISETERKLLSEETQKTYSKIACCSPEDIDSVKIYKIKRYLAYRSNMLLFFSLINDIFVKGVVKDNGEEVGEIWRIIDSKEIDEKKTYDLLVENFKKRMSQEFINYKQSIENKIEKNTNKIKEIEQKLKKEKYKKEINRLKKQLIELNRENDLLEKDKIELSDEEIREDIEKILKIYSDLRHKLMHYNYQYFENLFENKKISKEKNEDVNLTELLDLNLFRYLPLVRQLKLENKTNYLEKEDKITVLGVSDSAIKYYSYYNFLCEQKNGFNNFINSFFSNDGEENKSFKEKINLSLEKEIEIMEKETNEKIKEINKNELQLMKEQKELGTAYVLDIHSLNDYKISHNERNKNVKLQNDIMNGNRDKNALDKINKKLVELKIKMDKITKRNSILRLKYKLQVAYGFLMEEYKGNIKKFKDEFDISKEKIKSYKSKGEKYLEVKSEKKYITKILNSIEDIHNITWLKNQEENNLFKFYVLTYILLPFEFRGDFLGFVKKHYYDIKNVEFLDENNDRLTPEQLEKMKNDSFFNKIRLFEKNSKKYDILKESILTSERIGKYFSLLNTGAKYFEYGGEENRGIFNKNIIIPIFKYYQIVLKLYNDVELAMLLTLSESDEKDINKIKELVTLKEKVSPKKIDYEKKYKFSVLLDCFNRIINLGKKDFLASEEVKEVAKTFTNLAYLRNKICHLNYSKFIDDLLTIDTNKSTTDSEGKLLINDRIRKLIKFIRENNQKMNISIDYNYINDYYMKKEKFIFGQRKQAKTIIDSGKKANKRNKAEELLKMYRVKKENINLIYELSKKLNELTKSELFLLDKKLLKDIDFTDVKIKNKSFFELKNDVKEVANIKQALQKHSSELIGIYKKEVIMAIKRSIVSKLIYDEEKVLSIIIYDKTNKKYEDFLLEIRRERDINKFQFLIDEKKEKLGYEKIIETKEKKKVVVKIQNNSELVSEPRIIKNKDKKKAKTPEEISKLGILDLTNHYCFNLKITL

SEQ ID NO: 20 - protein, 897 aa, Artificial Sequence
  Chemically Synthesized
MENKGNNKKIDFDENYNILVAQIKEYFTKEIENYNNRIDNIIDKKELLKYSEKKEESEKNKKLEELNKLKSQKLKILTDEEIKADVIKIIKIFSDLRHSLMHYEYKYFENLFENKKNEELAELLNLNLFKNLTLLRQMKIENKTNYLEGREEFNIIGKNIKAKEVLGHYNLLAEQKNGFNNFINSFFVQDGTENLEFKKLIDEHFVNAKKRLERNIKKSKKLEKELEKMEQHYQRLNCAYVWDIHTSTTYKKLYNKRKSLIEEYNKQINEIKDKEVITAINVELLRIKKEMEEITKSNSLFRLKYKMQIAYAFLEIEFGGNIAKFKDEFDCSKMEEVQKYLKKGVKYLKYYKDKEAQKNYEFPFEEIFENKDTHNEEWLENTSENNLFKFYILTYLLLPMEFKGDFLGVVKKHYYDIKNVDFTDESEKELSQVQLDKMIGDSFFHKIRLFEKNTKRYEIIKYSILTSDEIKRYFRLLELDVPYFEYEKGTDEIGIFNKNIILTIFKYYQIIFRLYNDLEIHGLFNISSDLDKILRDLKSYGNKNINFREFLYVIKQNNNSSTEEEYRKIWENLEAKYLRLHLLTPEKEEIKTKTKEELEKLNEISNLRNGICHLNYKEIIEEILKTEISEKNKEATLNEKIRKVINFIKENELDKVELGFNFINDFFMKKEQFMFGQIKQVKEGNSDSITTERERKEKNNKKLKETYELNCDNLSEFYETSNNLRERANSSSLLEDSAFLKKIGLYKVKNNKVNSKVKDEEKRIENIKRKLLKDSSDIMGMYKAEVVKKLKEKLILIFKHDEEKRIYVTVYDTSKAVPENISKEILVKRNNSKEEYFFEDNNKKYVTEYYTLEITETNELKVIPAKKLEGKEFKTEKNKENKLMLNNHYCFNVKIIY

SEQ ID NO: 21 - protein, 1285 aa, Artificial Sequence
  Chemically Synthesized
MKLTRRRISGNSVDQKITAAFYRDMSQGLLYYDSEDNDCTDKVIESMDFERSWRGRILKNGEDDKNPFYMFVKGLVGSNDKIVCEPIDVDSDPDNLDILINKNLTGFGRNLKAPDSNDTLENLIRKIQAGIPEEEVLPELKKIKEMIQKDIVNRKEQLLKSIKNNRIPFSLEGSKLVPSTKKMKWLFKLIDVPNKTFNEKMLEKYWEIYDYDKLKANITNRLDKTDKKARSISRAVSEELREYHKNLRTNYNRFVSGDRPAAGLDNGGSAKYNPDKEEFLLFLKEVEQYFKKYFPVKSKHSNKSKDKSLVDKYKNYCSYKVVKKEVNRSIINQLVAGLIQQGKLLYYFYYNDTWQEDFLNSYGLSYIQVEEAFKKSVMTSLSWGINRLTSFFIDDSNTVKFDDITTKKAKEAIESNYFNKLRTCSRMQDHFKEKLAFFYPVYVKDKKDRPDDDIENLIVLVKNAIESVSYLRNRTFHFKESSLLELLKELDDKNSGQNKIDYSVAAEFIKRDIENLYDVFREQIRSLGIAEYYKADMISDCFKTCGLEFALYSPKNSLMPAFKNVYKRGANLNKAYIRDKGPKETGDQGQNSYKALEEYRELTWYIEVKNNDQSYNAYKNLLQLIYYHAFLPEVRENEALITDFINRTKEWNRKETEERLNTKNNKKHKNFDENDDITVNTYRYESIPDYQGESLDDYLKVLQRKQMARAKEVNEKEEGNNNYIQFIRDVVVWAFGAYLENKLKNYKNELQPPLSKENIGLNDTLKELFPEEKVKSPFNIKCRFSISTFIDNKGKSTDNTSAEAVKTDGKEDEKDKKNIKRKDLLCFYLFLRLLDENEICKLQHQFIKYRCSLKERRFPGNRTKLEKETELLAELEELMELVRFTMPSIPEISAKAESGYDTMIKKYFKDFIEKKVFKNPKTSNLYYHSDSKTPVTRKYMALLMRSAPLHLYKDIFKGYYLITKKECLEYIKLSNIIKDYQNSLNELHEQLERIKLKSEKQNGKDSLYLDKKDFYKVKEYVENLEQVARYKHLQHKINFESLYRIFRIHVDIAARMVGYTQDWERDMHFLFKALVYNGVLEERRFEAIFNNNDDNNDGRIVKKIQNNLNNKNRELVSMLCWNKKLNKNEFGAIIWKRNPIAHLNHFTQTEQNSKSSLESLINSLRILLAYDRKRQNAVTKTINDLLLNDYHIRIKWEGRVDEGQIYFNIKEKEDIENEPIIHLKHLHKKDCYIYKNSYMFDKQKEWICNGIKEEVYDKSILKCIGNLFKFDYEDKNKSSANPKHT

SEQ ID NO: 22 - protein, 1051 aa, Artificial Sequence
  Chemically Synthesized
MKITKMRVDGRTIVMERTSKEGQLGYEGIDGNKTTEIIFDKKKESFYKSILNKTVRKPDEKEKNRRKQAINKAINKEITELMLAVLHQEVPSQKLHNLKSLNTESLTKLFKPKFQNMISYPPSKGAEHVQFCLTDIAVPAIRDLDEIKPDWGIFFEKLKPYTDWAESYIHYKQTTIQKSIEQNKIQSPDSPRKLVLQKYVTAFLNGEPLGLDLVAKKYKLADLAESFKLVDLNEDKSANYKIKACLQQHQRNILDELKEDPELNQYGIEVKKYIQRYFPIKRAPNRSKHARADFLKKELIESTVEQQFKNAVYHYVLEQGKMEAYELTDPKTKDLQDIRSGEAFSFKFINACAFASNNLKMILNPECEKDILGKGNFKKNLPNSTTRSDVVKKMIPFFSDELQNVNFDEAIWAIRGSIQQIRNEVYHCKKHSWKSILKIKGFEFEPNNMKYADSDMQKLMDKDIAKIPEFIEEKLKSSGVVRFYRHDELQSIWEMKQGFSLLTTNAPFVPSFKRVYAKGHDYQTSKNRYYNLDLTTFDILEYGEEDFRARYFLTKLVYYQQFMPWFTADNNAFRDAANFVLRLNKNRQQDAKAFINIREVEEGEMPRDYMGYVQGQIAIHEDSIEDTPNHFEKFISQVFIKGFDRHMRSANLKFIKNPRNQGLEQSEIEEMSFDIKVEPSFLKNKDDYIAFWIFCKMLDARHLSELRNEMIKYDGHLTGEQEIIGLALLGVDSRENDWKQFFSSEREYEKIMKGYVVEELYQREPYRQSDGKTPILFRGVEQARKYGTETVIQRLFDANPEFKVSKCNLAEWERQKETIEETIKRRKELHNEWAKNPKKPQNNAFFKEYKECCDAIDAYNWHKNKTTLAYVNELHHLLIEILGRYVGYVAIADRDFQCMANQYFKHSGITERVEYWGDNRLKSIKKLDTFLKKEGLFVSEKNARNHIAHLNYLSLKSECTLLYLSERLREIFKYDRKLKNAVSKSLIDILDRHGMSVVFANLKENKHRLVIKSLEPKKLRHLGGKKIDGGYIETNQVSEEYCGIVKRLLEM

SEQ ID NO: 23 - protein, 1340 aa, Artificial Sequence
  Chemically Synthesized
MQISKVNHKHVAVGQKDRERITGFIYNDPVGDEKSLEDVVAKRANDTKVLFNVFNTKDLYDSQESDKSEKDKEIISKGAKFVAKSFNSAITILKKQNKIYSTLTSQQVIKELKDKFGGARIYDDDIEEALTETLKKSFRKENVRNSIKVLIENAAGIRSSLSKDEEELIQEYFVKQLVEEYTKTKLQKNVVKSIKNQNMVIQPDSDSQVLSLSESRREKQSSAVSSDTLVNCKEKDVLKAFLTDYAVLDEDERNSLLWKLRNLVNLYFYGSESIRDYSYTKEKSVWKEHDEQKANKTLFIDEICHITKIGKNGKEQKVLDYEENRSRCRKQNINYYRSALNYAKNNTSGIFENEDSNHFWIHLIENEVERLYNGIENGEEFKFETGYISEKVWKAVINHLSIKYIALGKAVYNYAMKELSSPGDIEPGKIDDSYINGITSFDYEIIKAEESLQRDISMNVVFATNYLACATVDTDKDFLLFSKEDIRSCTKKDGNLCKNIMQFWGGYSTWKNFCEEYLKDDKDALELLYSLKSMLYSMRNSSFHFSTENVDNGSWDTELIGKLFEEDCNRAARIEKEKFYNNNLHMFYSSSLLEKVLERLYSSHHERASQVPSFNRVFVRKNFPSSLSEQRITPKFTDSKDEQIWQSAVYYLCKEIYYNDFLQSKEAYKLFREGVKNLDKNDINNQKAADSFKQAVVYYGKAIGNATLSQVCQAIMTEYNRQNNDGLKKKSAYAEKQNSNKYKHYPLFLKQVLQSAFWEYLDENKEIYGFISAQIHKSNVEIKAEDFIANYSSQQYKKLVDKVKKTPELQKWYTLGRLINPRQANQFLGSIRNYVQFVKDIQRRAKENGNPIRNYYEVLESDSIIKILEMCTKLNGTTSNDIHDYFRDEDEYAEYISQFVNFGDVHSGAALNAFCNSESEGKKNGIYYDGINPIVNRNWVLCKLYGSPDLISKIISRVNENMIHDFHKQEDLIREYQIKGICSNKKEQQDLRTFQVLKNRVELRDIVEYSEIINELYGQLIKWCYLRERDLMYFQLGFHYLCLNNASSKEADYIKINVDDRNISGAILYQIAAMYINGLPVYYKKDDMYVALKSGKKASDELNSNEQTSKKINYFLKYGNNILGDKKDQLYLAGLELFENVAEHENIIIFRNEIDHFHYFYDRDRSMLDLYSEVFDRFFTYDMKLRKNVVNMLYNILLDHNIVSSFVFETGEKKVGRGDSEVIKPSAKIRLRANNGVSSDVFTYKVGSKDELKIATLPAKNEEFLLNVARLIYYPDMEAVSENMVREGVVKVEKSNDKKGKISRGSNTRSSNQSKYNNKSKNRMNYSMGSIFEKMDLKFD

SEQ ID NO: 24 - protein, 1437 aa, Artificial Sequence
  Chemically Synthesized
MKISKVREENRGAKLTVNAKTAVVSENRSQEGILYNDPSRYGKSRKNDEDRDRYIESRLKSSGKLYRIFNEDKNKRETDELQWFLSEIVKKINRRNGLVLSDMLSVDDRAFEKAFEKYAELSYTNRRNKVSGSPAFETCGVDAATAERLKGIISETNFINRIKNNIDNKVSEDIIDRIIAKYLKKSLCRERVKRGLKKLLMNAFDLPYSDPDIDVQRDFIDYVLEDFYHVRAKSQVSRSIKNMNMPVQPEGDGKFAITVSKGGTESGNKRSAEKEAFKKFLSDYASLDERVRDDMLRRMRRLVVLYFYGSDDSKLSDVNEKFDVWEDHAARRVDNREFIKLPLENKLANGKTDKDAERIRKNTVKELYRNQNIGCYRQAVKAVEEDNNGRYFDDKMLNMFFIHRIEYGVEKIYANLKQVTEFKARTGYLSEKIWKDLINYISIKYIAMGKAVYNYAMDELNASDKKEIELGKISEEYLSGISSFDYELIKAEEMLQRETAVYVAFAARHLSSQTVELDSENSDFLLLKPKGTMDKNDKNKLASNNILNFLKDKETLRDTILQYFGGHSLWTDFPFDKYLAGGKDDVDFLTDLKDVIYSMRNDSFHYATENHNNGKWNKELISAMFEHETERMTVVMKDKFYSNNLPMFYKNDDLKKLLIDLYKDNVERASQVPSFNKVFVRKNFPALVRDKDNLGIELDLKADADKGENELKFYNALYYMFKEIYYNAFLNDKNVRERFITKATKVADNYDRNKERNLKDRIKSAGSDEKKKLREQLQNYIAENDFGQRIKNIVQVNPDYTLAQICQLIMTEYNQQNNGCMQKKSAARKDINKDSYQHYKMLLLVNLRKAFLEFIKENYAFVLKPYKHDLCDKADFVPDFAKYVKPYAGLISRVAGSSELQKWYIVSRFLSPAQANHMLGFLHSYKQYVWDIYRRASETGTEINHSIAEDKIAGVDITDVDAVIDLSVKLCGTISSEISDYFKDDEVYAEYISSYLDFEYDGGNYKDSLNRFCNSDAVNDQKVALYYDGEHPKLNRNIILSKLYGERRFLEKITDRVSRSDIVEYYKLKKETSQYQTKGIFDSEDEQKNIKKFQEMKNIVEFRDLMDYSEIADELQGQLINWIYLRERDLMNFQLGYHYACLNNDSNKQATYVTLDYQGKKNRKINGAILYQICAMYINGLPLYYVDKDSSEWTVSDGKESTGAKIGEFYRYAKSFENTSDCYASGLEIFENISEHDNITELRNYIEHFRYYSSFDRSFLGIYSEVFDRFFTYDLKYRKNVPTILYNILLQHFVNVRFEFVSGKKMIGIDKKDRKIAKEKECARITIREKNGVYSEQFTYKLKNGTVYVDARDKRYLQSIIRLLFYPEKVNMDEMIEVKEKKKPSDNNTGKGYSKRDRQQDRKEYDKYKEKKKKEGNFLSGMGGNINWDEINAQLKN

SEQ ID NO: 25 - protein, 1159 aa, Artificial Sequence
  Chemically Synthesized
MKVTKVGGISHKKYTSEGRLVKSESEENRTDERLSALLNMRLDMYIKNPSSTETKENQKRIGKLKKFFSNKMVYLKDNTLSLKNGKKENIDREYSETDILESDVRDKKNFAVLKKIYLNENVNSEELEVFRNDIKKKLNKINSLKYSFEKNKANYQKINENNIEKVEGKSKRNIIYDYYRESAKRDAYVSNVKEAFDKLYKEEDIAKLVLEIENLTKLEKYKIREFYHEIIGRKNDKENFAKIIYEEIQNVNNMKELIEKVPDMSELKKSQVFYKYYLDKEELNDKNIKYAFCHFVEIEMSQLLKNYVYKRLSNISNDKIKRIFEYQNLKKLIENKLLNKLDTYVRNCGKYNYYLQDGEIATSDFIARNRQNEAFLRNIIGVSSVAYFSLRNILETENENDITGRMRGKTVKNNKGEEKYVSGEVDKIYNENKKNEVKENLKMFYSYDFNMDNKNEIEDFFANIDEAISSIRHGIVHFNLELEGKDIFAFKNIAPSEISKKMFQNEINEKKLKLKIFRQLNSANVFRYLEKYKILNYLKRTRFEFVNKNIPFVPSFTKLYSRIDDLKNSLGIYWKTPKTNDDNKTKEIIDAQIYLLKNIYYGEFLNYFMSNNGNFFEISKEIIELNKNDKRNLKTGFYKLQKFEDIQEKIPKEYLANIQSLYMINAGNQDEEEKDTYIDFIQKIFLKGFMTYLANNGRLSLIYIGSDEETNTSLAEKKQEFDKFLKKYEQNNNIKIPYEINEFLREIKLGNILKYTERLNMFYLILKLLNHKELTNLKGSLEKYQSANKEEAFSDQLELINLLNLDNNRVTEDFELEADEIGKFLDFNGNKVKDNKELKKFDTNKIYFDGENIIKHRAFYNIKKYGMLNLLEKIADKAGYKISIEELKKYSNKKNEIEKNHKMQENLHRKYARPRKDEKFTDEDYESYKQAIENIEEYTHLKNKVEFNELNLLQGLLLRILHRLVGYTSIWERDLRFRLKGEFPENQYIEEIFNFENKKNVKYKGGQIVEKYIKFYKELHQNDEVKINKYSSANIKVLKQEKKDLYIRNYIAHFNYIPHAEISLLEVLENLRKLLSYDRKLKNAVMKSVVDILKEYGFVATFKIGADKKIGIQTLESEKIVHLKNLKKKKLMTDRNSEELCKLVKIMFEYKMEEKKSEN

SEQ ID NO: 26 - protein, 1120 aa, Artificial Sequence
  Chemically Synthesized
MWISIKTLIHHLGVLFFCDYMYNRREKKIIEVKTMRITKVEVDRKKVLISRDKNGGKLVYENEMQDNTEQIMHHKKSSFYKSVVNKTICRPEQKQMKKLVHGLLQENSQEKIKVSDVTKLNISNFLNHRFKKSLYYFPENSPDKSEEYRIEINLSQLLEDSLKKQQGTFICWESFSKDMELYINWAENYISSKTKLIKKSIRNNRIQSTESRSGQLMDRYMKDILNKNKPFDIQSVSEKYQLEKLTSALKATFKEAKKNDKEINYKLKSTLQNHERQIIEELKENSELNQFNIEIRKHLETYFPIKKTNRKVGDIRNLEIGEIQKIVNHRLKNKIVQRILQEGKLASYEIESTVNSNSLQKIKIEEAFALKFINACLFASNNLRNMVYPVCKKDILMIGEFKNSFKEIKHKKFIRQWSQFFSQEITVDDIELASWGLRGAIAPIRNEIIHLKKHSWKKFFNNPTFKVKKSKIINGKTKDVTSEFLYKETLFKDYFYSELDSVPELIINKMESSKILDYYSSDQLNQVFTIPNFELSLLTSAVPFAPSFKRVYLKGFDYQNQDEAQPDYNLKLNIYNEKAFNSEAFQAQYSLFKMVYYQVFLPQFTTNNDLFKSSVDFILTLNKERKGYAKAFQDIRKMNKDEKPSEYMSYIQSQLMLYQKKQEEKEKINHFEKFINQVFIKGFNSFIEKNRLTYICHPTKNTVPENDNIEIPFHTDMDDSNIAFWLMCKLLDAKQLSELRNEMIKFSCSLQSTEEISTFTKAREVIGLALLNGEKGCNDWKELFDDKEAWKKNMSLYVSEELLQSLPYTQEDGQTPVINRSIDLVKKYGTETILEKLFSSSDDYKVSAKDIAKLHEYDVTEKIAQQESLHKQWIEKPGLARDSAWTKKYQNVINDISNYQWAKTKVELTQVRHLHQLTIDLLSRLAGYMSIADRDFQFSSNYILERENSEYRVTSWILLSENKNKNKYNDYELYNLKNASIKVSSKNDPQLKVDLKQLRLTLEYLELFDNRLKEKRNNISHFNYLNGQLGNSILELFDDARDVLSYDRKLKNAVSKSLKEILSSHGMEVTFKPLYQTNHHLKIDKLQPKKIHHLGEKSTVSSNQVSNEYCQLVRTLLTMK

SEQ ID NO: 27 - protein, 1389 aa, Artificial Sequence
  Chemically Synthesized
MGNLFGHKRWYEVRDKKDFKIKRKVKVKRNYDGNKYILNINENNNKEKIDNNKFIRKYINYKKNDNILKEFTRKFHAGNILFKLKGKEGIIRIENNDDFLETEEVVLYIEAYGKSEKLKALGITKKKIIDEAIRQGITKDDKKIEIKRQENEEEIEIDIRDEYTNKTLNDCSIILRIIENDELETKKSIYEIFKNINMSLYKIIEKIIENETEKVFENRYYEEHLREKLLKDDKIDVILTNFMEIREKIKSNLEILGFVKFYLNVGGDKKKSKNKKMLVEKILNINVDLTVEDIADFVIKELEFWNITKRIEKVKKVNNEFLEKRRNRTYIKSYVLLDKHEKFKIERENKKDKIVKFFVENIKNNSIKEKIEKILAEFKIDELIKKLEKELKKGNCDTEIFGIFKKHYKVNFDSKKFSKKSDEEKELYKIIYRYLKGRIEKILVNEQKVRLKKMEKIEIEKILNESILSEKILKRVKQYTLEHIMYLGKLRHNDIDMTTVNTDDFSRLHAKEELDLELITFFASTNMELNKIFSRENINNDENIDFFGGDREKNYVLDKKILNSKIKIIRDLDFIDNKNNITNNFIRKFTKIGTNERNRILHAISKERDLQGTQDDYNKVINIIQNLKISDEEVSKALNLDVVFKDKKNIITKINDIKISEENNNDIKYLPSFSKVLPEILNLYRNNPKNEPFDTIETEKIVLNALIYVNKELYKKLILEDDLEENESKNIFLQELKKTLGNIDEIDENIIENYYKNAQISASKGNNKAIKKYQKKVIECYIGYLRKNYEELFDFSDFKMNIQEIKKQIKDINDNKTYERITVKTSDKTIVINDDFEYIISIFALLNSNAVINKIRNRFFATSVWLNTSEYQNIIDILDEIMQLNTLRNECITENWNLNLEEFIQKMKEIEKDFDDFKIQTKKEIFNNYYEDIKNNILTEFKDDINGCDVLEKKLEKIVIFDDETKFEIDKKSNILQDEQRKLSNINKKDLKKKVDQYIKDKDQEIKSKILCRIIFNSDFLKKYKKEIDNLIEDMESENENKFQEIYYPKERKNELYIYKKNLFLNIGNPNFDKIYGLISNDIKMADAKFLFNIDGKNIRKNKISEIDAILKNLNDKLNGYSKEYKEKYIKKLKENDDFFAKNIQNKNYKSFEKDYNRVSEYKKIRDLVEFNYLNKIESYLIDINWKLAIQMARFERDMHYIVNGLRELGIIKLSGYNTGISRAYPKRNGSDGFYTTTAYYKFFDEESYKKFEKICYGFGIDLSENSEINKPENESIRNYISHFYIVRNPFADYSIAEQIDRVSNLLSYSTRYNNSTYASVFEVFKKDVNLDYDELKKKFKLIGNNDILERLMKPKKVSVLELESYNSDYIKNLIIELLTKIENTNDTL

SEQ ID NO: 28 - protein, 1385 aa, Artificial Sequence
  Chemically Synthesized
MGNLFGHKRWYEVRDKKDFKIKRKVKVKRNYDGNKYILNINENNNKEKIDNNKFIGEFVNYKKNNNVLKEFKRKFHAGNILFKLKGKEEIIRIENNDDFLETEEVVLYIEVYGKSEKLKALEITKKKIIDEAIRQGITKDDKKIEIKRQENEEEIEIDIRDEYTNKTLNDCSIILRIIENDELETKKSIYEIFKNINMSLYKIIEKIIENETEKVFENRYYEEHLREKLLKDNKIDVILTNFMEIREKIKSNLEIMGFVKFYLNVSGDKKKSENKKMFVEKILNTNVDLTVEDIVDFIVKELKFWNITKRIEKVKKFNNEFLENRRNRTYIKSYVLLDKHEKFKIERENKKDKIVKFFVENIKNNSIKEKIEKILAEFKINELIKKLEKELKKGNCDTEIFGIFKKHYKVNFDSKKFSNKSDEEKELYKIIYRYLKGRIEKILVNEQKVRLKKMEKIEIEKILNESILSEKILKRVKQYTLEHIMYLGKLRHNDIVKMTVNTDDFSRLHAKEELDLELITFFASTNMELNKIFNGKEKVTDFFGFNLNGQKITLKEKVPSFKLNILKKLNFINNENNIDEKLSHFYSFQKEGYLLRNKILHNSYGNIQETKNLKGEYENVEKLIKELKVSDEEISKSLSLDVIFEGKVDIINKINSLKIGEYKDKKYLPSFSKIVLEITRKFREINKDKLFDIESEKIILNAVKYVNKILYEKITSNEENEFLKTLPDKLVKKSNNKKENKNLLSIEEYYKNAQVSSSKGDKKAIKKYQNKVTNAYLEYLENTFTEIIDFSKFNLNYDEIKTKIEERKDNKSKIIIDSISTNINITNDIEYIISIFALLNSNTYINKIRNRFFATSVWLEKQNGTKEYDYENIISILDEVLLINLLRENNITDILDLKNAIIDAKIVENDETYIKNYIFESNEEKLKKRLFCEELVDKEDIRKIFEDENFKFKSFIKKNEIGNFKINFGILSNLECNSEVEAKKIIGKNSKKLESFIQNIIDEYKSNIRTLFSSEFLEKYKEEIDNLVEDTESENKNKFEKIYYPKEHKNELYIYKKNLFLNIGNPNFDKIYGLISKDIKNVDTKILFDDDIKKNKISEIDAILKNLNDKLNGYSNDYKAKYVNKLKENDDFFAKNIQNENYSSFGEFEKDYNKVSEYKKIRDLVEFNYLNKIESYLIDINWKLAIQMARFERDMHYIVNGLRELGIIKLSGYNTGISRAYPKRNGSDGFYTTTAYYKFFDEESYKKFEKICYGFGIDLSENSEINKPENESIRNYISHFYIVRNPFADYSIAEQIDRVSNLLSYSTRYNNSTYASVFEVFKKDVNLDYDELKKKFRLIGNNDILERLMKPKKVSVLELESYNSDYIKNLIIELLTKIENTNDTL

SEQ ID NO: 29 - protein, 1152 aa, Artificial Sequence
  Chemically Synthesized
MKVTKVDGISHKKYIEEGKLVKSTSEENRTSERLSELLSIRLDIYIKNPDNASEEENRIRRENLKKFFSNKVLHLKDSVLYLKNRKEKNAVQDKNYSEEDISEYDLKNKNSFSVLKKILLNEDVNSEELEIFRKDVEAKLNKINSLKYSFEENKANYQKINENNVEKVGGKSKRNIIYDYYRESAKRNDYINNVQEAFDKLYKKEDIEKLFFLIENSKKHEKYKIREYYHKIIGRKNDKENFAKIIYEEIQNVNNIKELIEKIPDMSELKKSQVFYKYYLDKEELNDKNIKYAFCHFVEIEMSQLLKNYVYKRLSNISNDKIKRIFEYQNLKKLIENKLLNKLDTYVRNCGKYNYYLQVGEIATSDFIARNRQNEAFLRNIIGVSSVAYFSLRNILETENENDITGRMRGKTVKNNKGEEKYVSGEVDKIYNENKQNEVKENLKMFYSYDFNMDNKNEIEDFFANIDEAISSIRHGIVHFNLELEGKDIFAFKNIAPSEISKKMFQNEINEKKLKLKIFKQLNSANVFNYYEKDVIIKYLKNTKFNFVNKNIPFVPSFTKLYNKIEDLRNTLKFFWSVPKDKEEKDAQIYLLKNIYYGEFLNKFVKNSKVFFKITNEVIKINKQRNQKTGHYKYQKFENIEKTVPVEYLAIIQSREMINNQDKEEKNTYIDFIQQIFLKGFIDYLNKNNLKYIESNNNNDNNDIFSKIKIKKDNKEKYDKILKNYEKHNRNKEIPHEINEFVREIKLGKILKYTENLNMFYLILKLLNHKELTNLKGSLEKYQSANKEETFSDELELINLLNLDNNRVTEDFELEANEIGKFLDFNENKIKDRKELKKFDTNKIYFDGENIIKHRAFYNIKKYGMLNLLEKIADKAKYKISLKELKEYSNKKNEIEKNYTMQQNLHRKYARPKKDEKFNDEDYKEYEKAIGNIQKYTHLKNKVEFNELNLLQGLLLKILHRLVGYTSIWERDLRFRLKGEFPENHYIEEIFNFDNSKNVKYKSGQIVEKYINFYKELYKDNVEKRSIYSDKKVKKLKQEKKDLYIRNYIAHFNYIPHAEISLLEVLENLRKLLSYDRKLKNAIMKSIVDILKEYGFVATFKIGADKKIEIQTLESEKIVHLKNLKKKKLMTDRNSEELCELVKVMFEYKALE

SEQ ID NO: 30 - protein, 1152 aa, Artificial Sequence; identical to SEQ ID NO: 29
  Chemically Synthesized

SEQ ID NO: 31 - protein, 970 aa, Artificial Sequence
  Chemically Synthesized
MLALLHQEVPSQKLHNLKSLNTESLTKLFKPKFQNMISYPPSKGAEHVQFCLTDIAVPAIRDLDEIKPDWGIFFEKLKPYTDWAESYIHYKQTTIQKSIEQNKIQSPDSPRKLVLQKYVTAFLNGEPLGLDLVAKKYKLADLAESFKVVDLNEDKSANYKIKACLQQHQRNILDELKEDPELNQYGIEVKKYIQRYFPIKRAPNRSKHARADFLKKELIESTVEQQFKNAVYHYVLEQGKMEAYELTDPKTKDLQDIRSGEAFSFKFINACAFASNNLKMILNPECEKDILGKGDFKKNLPNSTTQSDVVKKMIPFFSDEIQNVNFDEAIWAIRGSIQQIRNEVYHCKKHSWKSILKIKGFEFEPNNMKYTDSDMQKLMDKDIAKIPDFIEEKLKSSGIIRFYSHDKLQSIWEMKQGFSLLTTNAPFVPSFKRVYAKGHDYQTSKNRYYDLGLTTFDILEYGEEDFRARYFLTKLVYYQQFMPWFTADNNAFRDAANFVLRLNKNRQQDAKAFINIREVEEGEMPRDYMGYVQGQIAIHEDSTEDTPNHFEKFISQVFIKGFDSHMRSADLKFIKNPRNQGLEQSEIEEMSFDIKVEPSFLKNKDDYIAFWTFCKMLDARHLSELRNEMIKYDGHLTGEQEIIGLALLGVDSRENDWKQFFSSEREYEKIMKGYVGEELYQREPYRQSDGKTPILFRGVEQARKYGTETVIQRLFDASPEFKVSKCNITEWERQKETIEETIERRKELHNEWEKNPKKPQNNAFFKEYKECCDAIDAYNWHKNKTTLVYVNELHHLLIEILGRYVGYVAIADRDFQCMANQYFKHSGITERVEYWGDNRLKSIKKLDTFLKKEGLFVSEKNARNHIAHLNYLSLKSECTLLYLSERLREIFKYDRKLKNAVSKSLIDILDRHGMSVVFANLKENKHRLVIKSLEPKKLRHLGEKKIDNGYIETNQVSEEYCGIVKRLLEI

SEQ ID NO: 32 - protein, 1124 aa, Artificial Sequence
  Chemically Synthesized
MEDDKKTTGSISYELKDKHFWAAFLNLARHNVYITINHINKLLEIREIDNDEKVLDIKTLWQKGNKDLNQKARLRELMTKHFPFLETAIYTKNKEDKKEVKQEKQAEAQSLESLKDCLFLFLDKLQEARNYYSHYKYSEFSKEPEFEEGLLEKMYNIFGNNIQLVINDYQHNKDINPDEDFKHLDRKGQFKYSFADNEGNITESGLLFFVSLFLEKKDAIWMQQKLNGFKDNLENKKKMTHEVFCRSRILMPKLRLESTQTQDWILLDMLNELIRCPKSLYERLQGDDREKFKVPFDPADEDYNAEQEPFKNTLIRHQDRFPYFVLRYFDYNEIFKNLRFQIDLGTYHFSIYKKLIGGQKEDRHLTHKLYGFERIQEFAKQNRPDEWKAIVKDLDTYETSNKRYISETTPHYHLENQKIGIRFRNGNKEIWPSLKTNDENNEKSKYKLDKQYQAEAFLSVHELLPMMFYYLLLKKEKPNNDEINASIVEGFIKREIRNIFKLYDAFANGEINNIDDLEKYCADKGIPKRHLPKQMVAILYDEHKDMVKEAKRKQKEMVKDTKKLLATLEKQTQKEKEDDGRNVKLLKSGEIARWLVNDMMRFQPVQKDNEGKPLNNSKANSTEYQMLQRSLALYNNEEKPTRYFRQVNLIESNNPHPFLKWTKWEECNNILTFYYSYLTKKIEFLNKLKPEDWKKNQYFLKLKEPKTNRETLVQGWKNGFNLPRGIFTEPIREWFKRHQNNSKEYEKVEALDRVGLVTKVIPLFFKEEYFKDKEENFKEDTQKEINDCVQPFYNFPYNVGNIHKPKEKDFLHREERIELWDKKKDKFKGYKEKIKSKKLTEKDKEEFRSYLEFQSWNKFERELRLVRNQDIVTWLLCKELIDKLKIDELNIEELKKLRLNNIDTDTAKKEKNNILNRVMPMELPVTVYEIDDSHKIVKDKPLHTIYIKEAETKLLKQGNFKALVKDRRLNGLFSFVKTNSEAESKRNPISKLRVEYELGEYQEARIEIIQDMLALEEKLINKYKDLPTNKFSEMLNSWLEGKDEADKARFQNDVDFLIAVRNAFSHNQYPMHNKIEFANIKPFSLYTANNSEEKGLGIANQLKDKTKETTDKIKKIEKPIETKE

SEQ ID NO: 33 - protein, 1127 aa, Artificial Sequence
  Chemically Synthesized
MQKQDKLFVDRKKNAIFAFPKYITIMENKEKPEPIYYELTDKHFWAAFLNLARHNVYTTINHINRRLEIAELKDDGYMMGIKGSWNEQAKKLDKKVRLRDLIMKHFPFLEAAAYEMTNSKSPNNKEQREKEQSEALSLNNLKNVLFIFLEKLQVLRNYYSHYKYSEESPKPIFETSLLKNMYKVFDANVRLVKRDYMHHENIDMQRDFTHLNRKKQVGRTKNIIDSPNFHYHFADKEGNMTIAGLLFFVSLFLDKKDAIWMQKKLKGFKDGRNLREQMTNEVFCRSRISLPKLKLENVQTKDWMQLDMLNELVRCPKSLYERLREKDRESFKVPFDIFSDDYNAEEEPFKNTLVRHQDRFPYFVLRYFDLNEIFEQLRFQIDLGTYHFSIYNKRIGDEDEVRHLTHHLYGFARIQDFAPQNQPEEWRKLVKDLDHFETSQEPYISKTAPHYHLENEKIGIKFCSAHNNLFPSLQTDKTCNGRSKFNLGTQFTAEAFLSVHELLPMMFYYLLLTKDYSRKESADKVEGIIRKEISNIYAIYDAFANNEINSIADLTRRLQNTNILQGHLPKQMISILKGRQKDMGKEAERKIGEMIDDTQRRLDLLCKQTNQKIRIGKRNAGLLKSGKIADWLVNDMMRFQPVQKDQNNIPINNSKANSTEYRMLQRALALFGSENFRLKAYFNQMNLVGNDNPHPFLAETQWEHQTNILSFYRNYLEARKKYLKGLKPQNWKQYQHFLILKVQKTNRNTLVTGWKNSFNLPRGIFTQPIREWFEKHNNSKRIYDQILSFDRVGFVAKAIPLYFAEEYKDNVQPFYDYPFNIGNRLKPKKRQFLDKKERVELWQKNKELFKNYPSEKKKTDLAYLDFLSWKKFERELRLIKNQDIVTWLMFKELFNMATVEGLKIGEIHLRDIDTNTANEESNNILNRIMPMKLPVKTYETDNKGNILKERPLATFYIEETETKVLKQGNFKALVKDRRLNGLFSFAETTDLNLEEHPISKLSVDLELIKYQTTRISIFEMTLGLEKKLIDKYSTLPTDSFRNMLERWLQCKANRPELKNYVNSLIAVRNAFSHNQYPMYDATLFAEVKKFTLFPSVDTKKIELNIAPQLLEIVGKAIKEIEKSENKN

SEQ ID NO: 34 - protein, 1119 aa, Artificial Sequence
  Chemically Synthesized
MTEQNEKPYNGTYYTLEDKHFWAAFLNLARHNAYITLAHIDRQLAYSKADITNDEDILFFKGQWKNLDNDLERKARLRSLILKHFSFLEGAAYGKKLFESQSSGNKSSKKKELSKKEKEELQANALSLDNLKSILFDFLQKLKDFRNYYSHYRHPESSELPLFDGNMLQRLYNVFDVSVQRVKRDHEHNDKVDPHRHFNHLVRKGKKDKYGNNDNPFFKHHFVDREGTVTEAGLLFFVSLFLEKRDAIWMQKKIRGFKGGTEAYQQMTNEVFCRSRISLPKLKLESLRTDDWMLLDMLNELVRCPKSLYDRLREEDRARFRVPVDILSDEDDTDGTEEDPFKNTLVRHQDRFPYFALRYFDLKKVFTSLRFHIDLGTYHFAIYKKNIGEQPEDRHLTRNLYGFGRIQDFAEEHRPEEWKRLVRDLDYFETGDKPYITQTTPHYHIEKGKIGLRFVPEGQHLWPSPEVGATRTGRSKYAQDKRLTAEAFLSVHELMPMMFYYFLLREKYSEEVSAEKVQGRIKRVIEDVYAVYDAFARDEINTRDELDACLADKGIRRGHLPRQMIAILSQEHKDMEEKVRKKLQEMIADTDHRLDMLDRQTDRKIRIGRKNAGLPKSGVVADWLVRDMMRFQPVAKDTSGKPLNNSKANSTEYRMLQRALALFGGEKERLTPYFRQMNLTGGNNPHPFLHETRWESHTNILSFYRSYLEARKAFLQSIGRSDRVENHRFLLLKEPKTDRQTLVAGWKGEFHLPRGIFTEAVRDCLIEMGYDEVGSYKEVGFMAKAVPLYFERASKDRVQPFYDYPFNVGNSLKPKKGRFLSKEKRAEEWESGKERFRLAKLKKEILEAKEHPYHDFKSWQKFERELRLVKNQDIITWMMCRDLMEENKVEGLDTGTLYLKDIRTDVQEQGSLNVLNRVKPMRLPVVVYRADSRGHVHKEQAPLATVYIEERDTKLLKQGNFKSFVKDRRLNGLFSFVDTGALAMEQYPISKLRVEYELAKYQTARVCAFEQTLELEESLLTRYPHLPDKNFRKMLESWSDPLLDKWPDLHGNVRLLIAVRNAFSHNQYPMYDETLFSSIRKYDPSSPDAIEERMGLNIAHRLSEEVKQAKEMVERIIQA

SEQ ID NO: 35 - protein, 1175 aa, Artificial Sequence
  Chemically Synthesized
MTEQSERPYNGTYYTLEDKHFWAAFLNLARHNAYITLTHIDRQLAYSKADITNDQDVLSFKALWKNFDNDLERKSRLRSLILKHFSFLEGAAYGKKLFESKSSGNKSSKNKELTKKEKEELQANALSLDNLKSILFDFLQKLKDFRNYYSHYRHSGSSELPLFDGNMLQRLYNVFDVSVQRVKIDHEHNDEVDPHYHFNHLVRKGKKDRYGHNDNPSFKHHFVDGEGMVTEAGLLFFVSLFLEKRDAIWMQKKIRGFKGGTETYQQMTNEVFCRSRISLPKLKLESLRMDDWMLLDMLNELVRCPKPLYDRLREDDRACFRVPVDILPDEDDTDGGGEDPFKNTLVRHQDRFPYFALRYFDLKKVFTSLRFHIDLGTYHFAIYKKMIGEQPEDRHLTRNLYGFGRIQDFAEEHRPEEWKRLVRDLDYFETGDKPYISQTSPHYHIEKGKIGLRFMPEGQHLWPSPEVGTTRTGRSKYAQDKRLTAEAFLSVHELMPMMFYYFLLREKYSEEVSAERVQGRIKRVIEDVYAVYDAFARDEINTRDELDACLADKGIRRGHLPRQMIAILSQEHKDMEEKIRKKLQEMMADTDHRLDMLDRQTDRKIRIGRKNAGLPKSGVIADWLVRDMMRFQPVAKDASGKPLNNSKANSTEYRMLQRALALFGGEKERLTPYFRQMNLTGGNNPHPFLHETRWESHTNILSFYRSYLRARKAFLERIGRSDRVENRPFLLLKEPKTDRQTLVAGWKGEFHLPRGIFTEAVRDCLIEMGHDEVASYKEVGFMAKAVPLYFERACEDRVQPFYDSPFNVGNSLKPKKGRFLSKEERAEEWERGKERFRDLEAWSYSAARRIEDAFAGIEYASPGNKKKIEQLLRDLSLWEAFESKLKVRADRINLAKLKKEILEAQEHPYHDFKSWQKFERELRLVKNQDIITWMMCRDLMEENKVEGLDTGTLYLKDIRPNVQEQGSLNVLNRVKPMRLPVVVYRADSRGHVHKEEAPLATVYIEERDTKLLKQGNFKSFVKDRRLNGLFSFVDTGGLAMEQYPISKLRVEYELAKYQTARVCVFELTLRLEESLLTRYPHLPDESFREMLESWSDPLLAKWPELHGKVRLLIAVRNAFSHNQYPMYDEAVFSSIRKYDPSSPDAIEERMGLNIAHRLSEEVKQAKETVERIIQA

SEQ ID NO: 36 - protein, 1120 aa, Artificial Sequence
  Chemically Synthesized
MEDDKKTTDSIRYELKDKHFWAAFLNLARHNVYITVNHINKILEEDEINRDGYENTLENSWNEIKDINKKDRLSKLIIKHFPFLEATTYRQNPTDTTKQKEEKQAEAQSLESLKKSFFVFIYKLRDLRNHYSHYKHSKSLERPKFEEDLQNKMYNIFDVSIQFVKEDYKHNTDINPKKDFKHLDRKRKGKFHYSFADNEGNITESGLLFFVSLFLEKKDAIWVQKKLEGFKCSNKSYQKMTNEVFCRSRMLLPKLRLESTQTQDWILLDMLNELIRCPKSLYERLQGVNRKKFYVSFDPADEDYDAEQEPFKNTLVRHQDRFPYFALRYFDYNEVFANLRFQIDLGTYHFSIYKKLIGGQKEDRHLTHKLYGFERIQEFDKQNRPDEWKAIVKDSDTFKKKEEKEEEKPYISETTPHYHLENKKIGIAFKNHNIWPSTQTELTNNKRKKYNLGTSIKAEAFLSVHELLPMMFYYLLLKTENTKNDNKVGGKKETKKQGKHKIEAIIESKIKDIYALYDAFANGEINSEDELKEYLKGKDIKIVHLPKQMIAILKNEHKDMAEKAEAKQEKMKLATENRLKTLDKQLKGKIQNGKRYNSAPKSGEIASWLVNDMMRFQPVQKDENGESLNNSKANSTEYQLLQRTLAFFGSEHERLAPYFKQTKLIESSNPHPFLNDTEWEKCSNILSFYRSYLKARKNFLESLKPEDWEKNQYFLMLKEPKTNRETLVQGWKNGFNLPRGFFTEPIRKWFMEHWKSIKVDDLKRVGLVAKVTPLFFSEKYKDSVQPFYNYPFNVGDVNKPKEEDFLHREERIELWDKKKDKFKGYKAKKKFKEMTDKEKEEHRSYLEFQSWNKFERELRLVRNQDIVTWLLCTELIDKLKIDELNIKELKKLRLKDINTDTAKKEKNNILNRVMPMELPVTVYKVNKGGYIIKNKPLHTIYIKEAETKLLKQGNFKALVKDRRLNGLFSFVKTPSEAESESNPISKLRVEYELGKYQNARLDIIEDMLALEKKLIDKYNSLDTDNFHNMLTGWLELKGEAKKARFQNDVKLLTAVRNAFSHNQYPMYDENLFGNIERFSLSSSNIIESKGLDIAAKLKEEVSKAAKKIQNEEDNKKEKET

SEQ ID NO: 37 - protein, 1132 aa, Artificial Sequence
  Chemically Synthesized
MEDDKKTKESTNMLDNKHFWAAFLNLARHNVYITVNHINKVLELKNKKDQDIIIDNDQDILAIKTHWEKVNGDLNKTERLRELMTKHFPFLETAIYTKNKEDKEEVKQEKQAKAQSFDSLKHCLFLFLEKLQEARNYYSHYKYSESTKEPMLEKELLKKMYNIFDDNIQLVIKDYQHNKDINPDEDFKHLDRTEEEFNYYFTTNKKGNITASGLLFFVSLFLEKKDAIWMQQKLRGFKDNRESKKKMTHEVFCRSRMLLPKLRLESTQTQDWILLDMLNELIRCPKSLYERLQGEYRKKFNVPFDSADEDYDAEQEPFKNTLVRHQDRFPYFALRYFDYNEIFTNLRFQIDLGTYHFSIYKKLIGGQKEDRHLTHKLYGFERIQEFAKQNRTDEWKAIVKDFDTYETSEEPYISETAPHYHLENQKIGIRFRNDNDEIWPSLKTNGENNEKRKYKLDKQYQAEAFLSVHELLPMMFYYLLLKKEEPNNDKKNASIVEGFIKREIRDIYKLYDAFANGEINNIDDLEKYCEDKGIPKRHLPKQMVAILYDEHKDMAEEAKRKQKEMVKDTKKLLATLEKQTQGEIEDGGRNIRLLKSGEIARWLVNDMMRFQPVQKDNEGNPLNNSKANSTEYQMLQRSLALYNKEEKPTRYFRQVNLINSSNPHPFLKWTKWEECNNILSFYRSYLTKKIEFLNKLKPEDWEKNQYFLKLKEPKTNRETLVQGWKNGFNLPRGIFTEPIREWFKRHQNDSEEYEKVETLDRVGLVTKVIPLFFKKEDSKDKEEYLKKDAQKEINNCVQPFYGFPYNVGNIHKPDEKDFLPSEERKKLWGDKKYKFKGYKAKVKSKKLTDKEKEEYRSYLEFQSWNKFERELRLVRNQDIVTWLLCTELIDKLKVEGLNVEELKKLRLKDIDTDTAKQEKNNILNRVMPMQLPVTVYEIDDSHNIVKDRPLHTVYIEETKTKLLKQGNFKALVKDRRLNGLFSFVDTSSETELKSNPISKSLVEYELGEYQNARIETIKDMLLLEETLIEKYKTLPTDNFSDMLNGWLEGKDEADKARFQNDVKLLVAVRNAFSHNQYPMRNRIAFANINPFSLSSADTSEEKKLDIANQLKDKTHKIIKRIIEIEKPIETKE

SEQ ID NO: 38 - protein, 1126 aa, Artificial Sequence
  Chemically Synthesized
MEDDKKTTDSIRYELKDKHFWAAFLNLARHNVYITVNHINKILEEGEINRDGYETTLKNTWNEIKDINKKDRLSKLIIKHFPFLEAATYRLNPTDTTKQKEEKQAEAQSLESLRKSFFVFIYKLRDLRNHYSHYKHSKSLERPKFEEGLLEKMYNIFNASIRLVKEDYQYNKDINPDEDFKHLDRTEEEFNYYFTKDNEGNITESGLLFFVSLFLEKKDAIWMQQKLRGFKDNRENKKKMTNEVFCRSRMLLPKLRLQSTQTQDWILLDMLNELIRCPKSLYERLREEDREKFRVPIEIADEDYDAEQEPFKNTLVRHQDRFPYFALRYFDYNEIFTNLRFQIDLGTYHFSIYKKQIGDYKESHHLTHKLYGFERIQEFTKQNRPDEWRKFVKTFNSFETSKEPYIPETTPHYHLENQKIGIRFRNDNDKIWPSLKTNSEKNEKSKYKLDKSFQAEAFLSVHELLPMMFYYLLLKTENTDNDNEIETKKKENKNDKQEKHKIEEIIENKITEIYALYDTFANGEIKSIDELEEYCKGKDIEIGHLPKQMIAILKDEHKVMATEAERKQEEMLVDVQKSLESLDNQINEEIENVERKNSSLKSGKIASWLVNDMMRFQPVQKDNEGKPLNNSKANSTEYQLLQRTLAFFGSEHERLAPYFKQTKLIESSNPHPFLKDTEWEKCNNILSFYRSYLEAKKNFLESLKPEDWEKNQYFLKLKEPKTKPKTLVQGWKNGFNLPRGIFTEPIRKWFMKHRENITVAELKRVGLVAKVIPLFFSEEYKDSVQPFYNYHFNVGNINKPDEKNFLNCEERRELLRKKKDEFKKMTDKEKEENPSYLEFKSWNKFERELRLVRNQDIVTWLLCMELFNKKKIKELNVEKIYLKNINTNTTKKEKNTEEKNGEEKNIKEKNNILNRIMPMRLPIKVYGRENFSKNKKKKIRRNTFFTVYIEEKGTKLLKQGNFKALERDRRLGGLFSFVKTPSKAESKSNTISKLRVEYELGEYQKARIEIIKDMLALEKTLIDKYNSLDTDNFNKMLTDWLELKGEPDKASFQNDVDLLIAVRNAFSHNQYPMRNRIAFANINPFSLSSANTSEEKGLGIANQLKDKTHKTIEKIIEIEKPIETKE

SEQ ID NO: 39 - protein, 1154 aa, Artificial Sequence
  Chemically Synthesized
MRVSKVKVKDGGKDKMVLVHRKTTGAQLVYSGQPVSNETSNILPEKKRQSFDLSTLNKTIIKFDTAKKQKLNVDQYKIVEKIFKYPKQELPKQIKAEEILPFLNHKFQEPVKYWKNGKEESFNLTLLIVEAVQAQDKRKLQPYYDWKTWYIQTKSDLLKKSIENNRIDLTENLSKRKKALLAWETEFTASGSIDLTHYHKVYMTDVLCKMLQDVKPLTDDKGKINTNAYHRGLKKALQNHQPAIFGTREVPNEANRADNQLSIYHLEVVKYLEHYFPIKTSKRRNTADDIAHYLKAQTLKTTIEKQLVNAIRANIIQQGKTNHHELKADTTSNDLIRIKTNEAFVLNLTGTCAFAANNIRNMVDNEQTNDILGKGDFIKSLLKDNTNSQLYSFFFGEGLSTNKAEKETQLWGIRGAVQQIRNNVNHYKKDALKTVFNISNFENPTITDPKQQTNYADTIYKARFINELEKIPEAFAQQLKTGGAVSYYTIENLKSLLTTFQFSLCRSTIPFAPGFKKVFNGGINYQNAKQDESFYELMLEQYLRKENFAEESYNARYFMLKLIYNNLFLPGFTTDRKAFADSVGFVQMQNKKQAEKVNPRKKEAYAFEAVRPMTAADSIADYMAYVQSELMQEQNKKEEKVAEETRINFEKFVLQVFIKGFDSFLRAKEFDFVQMPQPQLTATASNQQKADKLNQLEASITADCKLTPQYAKADDATHIAFYVFCKLLDAAHLSNLRNELIKFRESVNEFKFHHLLEIIEICLLSADVVPTDYRDLYSSEADCLARLRPFIEQGADITNWSDLFVQSDKHSPVIHANIELSVKYGTTKLLEQIINKDTQFKTTEANFTAWNTAQKSIEQLIKQREDHHEQWVKAKNADDKEKQERKREKSNFAQKFIEKHGDDYLDICDYINTYNWLDNKMHFVHLNRLHGLTIELLGRMAGFVALFDRDFQFFDEQQIADEFKLHGFVNLHSIDKKLNEVPTKKIKEIYDIRNKIIQINGNKINESVRANLIQFISSKRNYYNNAFLHVSNDEIKEKQMYDIRNHIAHFNYLTKDAADFSLIDLINELRELLHYDRKLKNAVSKAFIDLFDKHGMILKLKLNADHKLKVESLEPKKIYHLGSSAKDKPEYQYCTNQVMMAYCNMCRSLLEMKK

SEQ ID NO: 40 - protein, 1151 aa, Artificial Sequence
  Chemically Synthesized
MEDKPFWAAFFNLARHNVYLTVNHINKLLDLEKLYDEGKHKEIFEREDIFNISDDVMNDANSNGKKRKLDIKKIWDDLDTDLTRKYQLRELILKHFPFIQPAIIGAQTKERTTIDKDKRSTSTSNDSLKQTGEGDINDLLSLSNVKSMFFRLLQILEQLRNYYSHVKHSKSATMPNFDEDLLNWMRYIFIDSVNKVKEDYSSNSVIDPNTSFSHLIYKDEQGKIKPCRYPFTSKDGSINAFGLLFFVSLFLEKQDSIWMQKKIPGFKKASENYMKMTNEVFCRNHILLPKIRLETVYDKDWMLLDMLNEVVRCPLSLYKRLTPAAQNKFKVPEKSSDNANRQEDDNPFSRILVRHQNRFPYFVLRFFDLNEVFTTLRFQINLGCYHFAICKKQIGDKKEVHHLIRTLYGFSRLQNFTQNTRPEEWNTLVKTTEPSSGNDGKTVQGVPLPYISYTIPHYQIENEKIGIKIFDGDTAVDTDIWPSVSTEKQLNKPDKYTLTPGFKADVFLSVHELLPMMFYYQLLLCEGMLKTDAGNAVEKVLIDTRNAIFNLYDAFVQEKINTITDLENYLQDKPILIGHLPKQMIDLLKGHQRDMLKAVEQKKAMLIKDTERRLKLLDKQLKQETDVAAKNTGTLLKNGQIADWLVNDMMRFQPVKRDKEGNPINCSKANSTEYQMLQRAFAFYATDSCRLSRYFTQLHLIHSDNSHLFLSRFEYDKQPNLIAFYAAYLKAKLEFLNELQPQNWASDNYFLLLRAPKNDRQKLAEGWKNGFNLPRGLFTEKIKTWFNEHKTIVDISDCDIFKNRVGQVARLIPVFFDKKFKDHSQPFYRYDFNVGNVSKPTEANYLSKGKREELFKSYQNKFKNNIPAEKTKEYREYKNFSLWKKFERELRLIKNQDILIWLMCKNLFDEKIKPKKDILEPRIAVSYIKLDSLQTNTSTAGSLNALAKVVPMTLAIHIDSPKPKGKAGNNEKENKEFTVYIKEEGTKLLKWGNFKTLLADRRIKGLFSYIEHDDIDLKQHPLTKRRVDLELDLYQTCRIDIFQQTLGLEAQLLDKYSDLNTDNFYQMLIGWRKKEGIPRNIKEDTDFLKDVRNAFSHNQYPDSKKIAFRRIRKFNPKELILEEEEGLGIATQMYKEVEKVVNRIKRIELFD

SEQ ID NO: 41 - protein, 1322 aa, Artificial Sequence
  Chemically Synthesized
MSKECKKQRQEKKRRLQKANFSISLTGKHVFGAYFNMARTNFVKTINYILPIAGVRGNYSENQINKMLHALFLIQAGRNEELTTEQKQWEKKLRLNPEQQTKFQKLLFKHFPVLGPMMADVADHKAYLNKKKSTVQTEDETFAMLKGVSLADCLDIICLMADTLTECRNFYTHKDPYNKPSQLADQYLHQEMIAKKLDKVVVASRRILKDREGLSVNEVEFLTGIDHLHQEVLKDEFGNAKVKDGKVMKTFVEYDDFYFKISGKRLVNGYTVTTKDDKPVNVNTMLPALSDFGLLYFCVLFLSKPYAKLFIDEVRLFEYSPFDDKENMIMSEMLSIYRIRTPRLHKIDSHDSKATLAMDIFGELRRCPMELYNLLDKNAGQPFFHDEVKHPNSHTPDVSKRLRYDDRFPTLALRYIDETELFKRIRFQLQLGSFRYKFYDKENCIDGRVRVRRIQKEINGYGRMQEVADKRMDKWGDLIQKREERSVKLEHEELYINLDQFLEDTADSTPYVTDRRPAYNIHANRIGLYWEDSQNPKQYKVFDENGMYIPELVVTEDKKAPIKMPAPRCALSVYDLPAMLFYEYLREQQDNEFPSAEQVIIEYEDDYRKFFKAVAEGKLKPFKRPKEFRDFLKKEYPKLRMADIPKKLQLFLCSHGLCYNNKPETVYERLDRLTLQHLEERELHIQNRLEHYQKDRDMIGNKDNQYGKKSFSDVRHGALARYLAQSMMEWQPTKLKDKEKGHDKLTGLNYNVLTAYLATYGHPQVPEEGFTPRTLEQVLINAHLIGGSNPHPFINKVLALGNRNIEELYLHYLEEELKHIRSRIQSLSSNPSDKALSALPFIHHDRMRYHERTSEEMMALAARYTTIQLPDGLFTPYILEILQKHYTENSDLQNALSQDVPVKLNPTCNAAYLITLFYQTVLKDNAQPFYLSDKTYTRNKDGEKAESFSFKRAYELFSVLNNNKKDTFPFEMIPLFLTSDEIQERLSAKLLDGDGNPVPEVGEKGKPATDSQGNTIWKRRIYSEVDDYAEKLTDRDMKISFKGEWEKLPRWKQDKIIKRRDETRRQMRDELLQRMPRYIRDIKDNERTLRRYKTQDMVLFLLAEKMFTNIISEQSSEFNWKQMRLSKVCNEAFLRQTLTFRVPVTVGETTIYVEQENMSLKNYGEFYRFLTDDRLMSLLNNIVETLKPNENGDLVIRHTDLMSELAAYDQYRSTIFMLIQSIENLIITNNAVLDDPDADGFWVREDLPKRNNFASLLELINQLNNVELTDDERKLLVAIRNAFSHNSYNIDFSLIKDVKHLPEVAKGILQHLQSMLGVEITK

SEQ ID NO: 42 - protein, 1095 aa, Artificial Sequence
  Chemically Synthesized
MEKPLLPNVYTLKHKFFWGAFLNIARHNAFITICHINEQLGLKTPSNDDKIVDVVCETWNNILNNDHDLLKKSQLTELILKHFPFLTAMCYHPPKKEGKKKGHQKEQQKEKESEAQSQAEALNPSKLIEALEILVNQLHSLRNYYSHYKHKKPDAEKDIFKHLYKAFDASLRMVKEDYKAHFTVNLTRDFAHLNRKGKNKQDNPDFNRYRFEKDGFFTESGLLFFTNLFLDKRDAYWMLKKVSGFKASHKQREKMTTEVFCRSRILLPKLRLESRYDHNQMLLDMLSELSRCPKLLYEKLSEENKKHFQVEADGFLDEIEEEQNPFKDTLIRHQDRFPYFALRYLDLNESFKSIRFQVDLGTYHYCIYDKKIGDEQEKRHLTRTLLSFGRLQDFTEINRPQEWKALTKDLDYKETSNQPFISKTTPHYHITDNKIGFRLGTSKELYPSLEIKDGANRIAKYPYNSGFVAHAFISVHELLPLMFYQHLTGKSEDLLKETVRHIQRIYKDFEEERINTIEDLEKANQGRLPLGAFPKQMLGLLQNKQPDLSEKAKIKIEKLIAETKLLSHRLNTKLKSSPKLGKRREKLIKTGVLADWLVKDFMRFQPVAYDAQNQPIKSSKANSTEFWFIRRALALYGGEKNRLEGYFKQTNLIGNTNPHPFLNKFNWKACRNLVDFYQQYLEQREKFLEAIKNQPWEPYQYCLLLKIPKENRKNLVKGWEQGGISLPRGLFTEAIRETLSEDLMLSKPIRKEIKKHGRVGFISRAITLYFKEKYQDKHQSFYNLSYKLEAKAPLLKREEHYEYWQQNKPQSPTESQRLELHTSDRWKDYLLYKRWQHLEKKLRLYRNQDVMLWLMTLELTKNHFKELNLNYHQLKLENLAVNVQEADAKLNPLNQTLPMVLPVKVYPATAFGEVQYHKTPIRTVYIREEHTKALKMGNFKALVKDRRLNGLFSFIKEENDTQKHPISQLRLRRELEIYQSLRVDAFKETLSLEEKLLNKHTSLSSLENEFRALLEEWKKEYAASSMVTDEHIAFIASVRNAFCHNQYPFYKEALHAPIPLFTVAQPTTEEKDGLGIAEALLKVLREYCEIVKSQI

SEQ ID NO: 43 - protein, 1285 aa, Artificial Sequence
  Chemically Synthesized
MQIGKVQGRTISEFGDPAGGLKRKISTDGKNRKELPAHLSSDPKALIGQWISGIDKIYRKPDSRKSDGKAIHSPTPSKMQFDARDDLGEAFWKLVSEAGLAQDSDYDQFKRRLHPYGDKFQPADSGAKLKFEADPPEPQAFHGRWYGAMSKRGNDAKELAAALYEHLHVDEKRIDGQPKRNPKTDKFAPGLVVARALGIESSVLPRGMARLARNWGEEEIQTYFVVDVAASVKEVAKAAVSAAQAFDPPRQVSGRSLSPKVGFALAEHLERVTGSKRCSFDPAAGPSVLALHDEVKKTYKRLCARGKNAARAFPADKTELLALMRHTHENRVRNQMVRMGRVSEYRGQQAGDLAQSHYWTSAGQTEIKESEIFVRLWVGAFALAGRSMKAWIDPMGKIVNTEKNDRDLTAAVNIRQVISNKEMVAEAMARRGIYFGETPELDRLGAEGNEGFVFALLRYLRGCRNQTFHLGARAGFLKEIRKELEKTRWGKAKEAEHVVLTDKTVAAIRAIIDNDAKALGARLLADLSGAFVAHYASKEHFSTLYSEIVKAVKDAPEVSSGLPRLKLLLKRADGVRGYVHGLRDTRKHAFATKLPPPPAPRELDDPATKARYIALLRLYDGPFRAYASGITGTALAGPAARAKEAATALAQSVNVTKAYSDVMEGRSSRLRPPNDGETLREYLSALTGETATEFRVQIGYESDSENARKQAEFIENYRRDMLAFMFEDYIRAKGFDWILKIEPGATAMTRAPVLPEPIDTRGQYEHWQAALYLVMHFVPASDVSNLLHQLRKWEALQGKYELVQDGDATDQADARREALDLVKRFRDVLVLFLKTGEARFEGRAAPFDLKPFRALFANPATFDRLFMATPTTARPAEDDPEGDGASEPELRVARTLRGLRQIARYNHMAVLSDLFAKHKVRDEEVARLAEIEDETQEKSQIVAAQELRTDLHDKVMKCHPKTISPEERQSYAAAIKTIEEHRFLVGRVYLGDHLRLHRLMMDVIGRLIDYAGAYERDTGTFLINASKQLGAGADWAVTIAGAANTDARTQTRKDLAHFNVLDRADGTPDLTALVNRAREMMAYDRKRKNAVPRSILDMLARLGLTLKWQMKDHLLQDATITQAAIKHLDKVRLTVGGPAAVTEARFSQDYLQMVAAVFNGSVQNPKPRRRDDGDAWHKPPKPATAQSQPDQKPPNKAPSAGSRLPPPQVGEVYEGVVVKVIDTGSLGFLAVEGVAGNIGLHISRLRRIREDAIIVGRRYRFRVEIYVPPKSNTSKLNAADLVRID

SEQ ID NO: 44 - protein, 1285 aa, Artificial Sequence; identical to SEQ ID NO: 43
  Chemically Synthesized

SEQ ID NO: 45 - protein, 1285 aa, Artificial Sequence
  Chemically Synthesized
MQIGKVQGRTISEFGDPAGGLKRKISTDGKNRKELPAHLSSDPKALIGQWISGIDKIYRKPDSRKSDGKAIHSPTPSKMQFDARDDLGEAFWKLVSEAGLAQDSDYDQFKRRLHPYGDKFQPADSGAKLKFEADPPEPQAFHGRWYGAMSKRGNDAKELAAALYEHLHVDEKRIDGQPKRNPKTDKFAPGLVVARALGIESSVLPRGMARLARNWGEEEIQTYFVVDVAASVKEVAKAAVSAAQAFDPPRQVSGRSLSPKVGFALAEHLERVTGSKRCSFDPAAGPSVLALHDEVKKTYKRLCARGKNAARAFPADKTELLALMRHTHENRVRNQMVRMGRVSEYRGQQAGDLAQSHYWTSAGQTEIKESEIFVRLWVGAFALAGRSMKAWIDPMGKIVNTEKNDRDLTAAVNIRQVISNKEMVAEAMARRGIYFGETPELDRLGAEGNEGFVFALLRYLRGCRNQTFHLGARAGFLKEIRKELEKTRWGKAKEAEHVVLTDKTVAAIRAIIDNDAKALGARLLADLSGAFVAHYASKEHFSTLYSEIVKAVKDAPEVSSGLPRLKLLLKRADGVRGYVHGLRDTRKHAFATKLPPPPAPRELDDPATKARYIALLRLYDGPFRAYASGITGTALAGPAARAKEAATALAQSVNVTKAYSDVMEGRTSRLRPPNDGETLREYLSALTGETATEFRVQIGYESDSENARKQAEFIENYRRDMLAFMFEDYIRAKGFDWILKIEPGATAMTRAPVLPEPIDTRGQYEHWQAALYLVMHFVPASDVSNLLHQLRKWEALQGKYELVQDGDATDQADARREALDLVKRFRDVLVLFLKTGEARFEGRAAPFDLKPFRALFANPATFDRLFMATPTTARPAEDDPEGDGASEPELRVARTLRGLRQIARYNHMAVLSDLFAKHKVRDEEVARLAEIEDETQEKSQIVAAQELRTDLHDKVMKCHPKTISPEERQSYAAAIKTIEEHRFLVGRVYLGDHLRLHRLMMDVIGRLIDYAGAYERDTGTFLINASKQLGAGADWAVTIAGAANTDARTQTRKDLAHFNVLDRADGTPDLTALVNRAREMMAYDRKRKNAVPRSILDMLARLGLTLKWQMKDHLLQDATITQAAIKHLDKVRLTVGGPAAVTEARFSQDYLQMVAAVFNGSVQNPKPRRRDDGDAWHKPPKPATAQSQPDQKPPNKAPSAGSRLPPPQVGEVYEGVVVKVIDTGSLGFLAVEGVAGNIGLHISRLRRIREDAIIVGRRYRFRVEIYVPPKSNTSKLNAADLVRID

SEQ ID NO: 46 - protein, 922 aa, Artificial Sequence
  Chemically Synthesized
MAKKNKMKPRELREAQKKARQLKAAEINNNAAPAIAAMPAAEVIAPVAEKKKSSVKAAGMKSILVSENKMYITSFGKGNSAVLEYEVDNNDYNKTQLSSKDNSNIELGDVNEVNITFSSKHGFGSGVEINTSNPTHRSGESSPVRGDMLGLKSELEKRFFGKTFDDNIHIQLIYNILDIEKILAVYVTNIVYALNNMLGIKDSESYDDFMGYLSARNTYEVFTHPDKSNLSDKVKGNIKKSLSKFNDLLKTKRLGYFGLEEPKTKDTRASEAYKKRVYHMLAIVGQIRQCVFHDKSGAKRFDLYSFINNIDPEYRDTLDYLVEERLKSINKDFIEGNKVNISLLIDMMKGYEADDIIRLYYDFIVLKSQKNLGFSIKKLREKMLEEYGFRFKDKQYDSVRSKMYKLMDFLLFCNYYRNDVAAGEALVRKLRFSMTDDEKEGIYADEAAKLWGKFRNDFENIADHMNGDVIKELGKADMDFDEKILDSEKKNASDLLYFSKMIYMLTYFLDGKEINDLLTTLISKFDNIKEFLKIMKSSAVDVECELTAGYKLFNDSQRITNELFIVKNIASMRKPAASAKLTMFRDALTILGIDDNITDDRISEILKLKEKGKGIHGLRNFITNNVIESSRFVYLIKYANAQKIREVAKNEKVVMFVLGGIPDTQIERYYKSCVEFPDMNSSLEAKRSELARMIKNISFDDFKNVKQQAKGRENVAKERAKAVIGLYLTVMYLLVKNLVNVNARYVIAIHCLERDFGLYKEIIPELASKNLKNDYRILSQTLCELCDDRNESSNLFLKKNKRLRKCVEVDINNADSSMTRKYRNCIAHLTVVRELKEYIGDIRTVDSYFSIYHYVMQRCITKRGDDTKQEEKIKYEDDLLKNHGYTKDFVKALNSPFGYNIPRFKNLSIEQLFDRNEYLTEK

SEQ ID NO: 47 - protein, 968 aa, Artificial Sequence
  Chemically Synthesized
IEKKKSFAKGMGVKSTLVSGSKVYMTTFAEGSDARLEKIVEGDSIRSVNEGEAFSAEMADKNAGYKIGNAKFSHPKGYAVVANNPLYTGPVQQDMLGLKETLEKRYFGESADGNDNICIQVIHNILDIEKILAEYITNAAYAVNNISGLDKDIIGFGKFSTVYTYDEFKDPEHHRAAFNNNDKLINAIKAQYDEFDNFLDNPRLGYFGQAFFSKEGRNYIINYGNECYDILALLSGLRHWVVHNNEEESRISRTWLYNLDKNLDNEYISTLNYLYDRITNELTNSFSKNSAANVNYIAETLGINPAEFAEQYFRFSIMKEQKNLGFNITKLREVMLDRKDMSEIRKNHKVFDSIRTKVYTMMDFVIYRYYIEEDAKVAAANKSLPDNEKSLSEKDIFVINLRGSFNDDQKDALYYDEANRIWRKLENIMHNIKEFRGNKTREYKKKDAPRLPRILPAGRDVSAFSKLMYALTMFLDGKEINDLLTTLINKFDNIQSFLKVMPLIGVNAKFVEEYAFFKDSAKIADELRLIKSFARMGEPIADARRAMYIDAIRILGTNLSYDELKALADTFSLDENGNKLKKGKHGMRNFIINNVISNKRFHYLIRYGDPAHLHEIAKNEAVVKFVLGRIADIQKKQGQNGKNQIDRYYETCIGKDKGKSVSEKVDALTKIITGMNYDQFDKKRSVIEDTGRENAEREKFKKIISLYLTVIYHILKNIVNINARYVIGFHCVERDAQLYKEKGYDINLKKLEEKGFSSVTKLCAGIDETAPDKRKDVEKEMAERAKESIDSLESANPKLYANYIKYSDEKKAEEFTRQINREKAKTALNAYLRNTKWNVIIREDLLRIDNKTCTLFRNKAVHLEVARYVHAYINDIAEVNSYFQLYHYIMQRIIMNERYEKSSGKVSEYFDAVNDEKKYNDRLLKLLCVPFGYCIPRFKNLSIEALFDRNEAAKFDKEKKKVSGNSGS

SEQ ID NO: 48 - protein, 1089 aa, Artificial Sequence
  Chemically Synthesized
NIPALVENQKKYFGTYSVMAMLNAQTVLDHIQKVADIEGEQNENNENLWFHPVMSHLYNAKNGYDKQPEKTMFIIERLQSYFPFLKIMAENQREYSNGKYKQNRVEVNSNDIFEVLKRAFGVLKMYRDLTNAYKTYEEKLNDGCEFLTSTEQPLSGMINNYYTVALRNMNERYGYKTEDLAFIQDKRFKFVKDAYGKKKSQVNTGFFLSLQDYNGDTQKKLHLSGVGIALLICLFLDKQYINIFLSRLPIFSSYNAQSEERRIIIRSFGINSIKLPKDRIHSEKSNKSVAMDMLNEVKRCPDELFTTLSAEKQSRFRIISDDHNEVLMKRSSDRFVPLLLQYIDYGKLFDHIRFHVNMGKLRYLLKADKTCIDGQTRVRVIEQPLNGFGRLEEAETMRKQENGTFGNSGIRIRDFENMKRDDANPANYPYIVDTYTHYILENNKVEMFINDKEDSAPLLPVIEDDRYVVKTIPSCRMSTLEIPAMAFHMFLFGSKKTEKLIVDVHNRYKRLFQAMQKEEVTAENIASFGIAESDLPQKILDLISGNAHGKDVDAFIRLTVDDMLTDTERRIKRFKDDRKSIRSADNKMGKRGFKQISTGKLADFLAKDIVLFQPSVNDGENKITGLNYRIMQSAIAVYDSGDDYEAKQQFKLMFEKARLIGKGTTEPHPFLYKVFARSIPANAVEFYERYLIERKFYLTGLSNEIKKGNRVDVPFIRRDQNKWKTPAMKTLGRIYSEDLPVELPRQMFDNEIKSHLKSLPQMEGIDFNNANVTYLIAEYMKRVLDDDFQTFYQWNRNYRYMDMLKGEYDRKGSLQHCFTSVEEREGLWKERASRTERYRKQASNKIRSNRQMRNASSEEIETILDKRLSNSRNEYQKSEKVIRRYRVQDALLFLLAKKTLTELADFDGERFKLKEIMPDAEKGILSEIMPMSFTFEKGGKKYTITSEGMKLKNYGDFFVLASDKRIGNLLELVGSDIVSKEDIMEEFNKYDQCRPEISSIVFNLEKWAFDTYPELSARVDREEKVDFKSILKILLNNKNINKEQSDILRKIRNAFDANNYPDKGVVEIKALPEIAMSIKKAFGEYAIMK

SEQ ID NO: 49 - protein, 982 aa, Artificial Sequence
  Chemically Synthesized
NIPALVENQKKYFGTYSVMAMLNAQTVLDHIQKVADIEGEQNENNENLWFHPVMSHLYNAKNGYDKQPEKTMFIIERLQSYFPFLKIMAENQREYSNGKYKQNRVEVNSNDIFEVLKRAFGVLKMYRDLTNAYKTYEEKLNDGCEFLTSTEQPLSGMINNYYTVALRNMNERYGYKTEDLAFIQDKRFKFVKDAYGKKKSQVNTGFFLSLQDYNGDTQKKLHLSGVGIALLICLFLDKQYINIFLSRLPIFSSYNAQSEERRIIIRSFGINSIKLPKDRIHSEKSNKSVAMDMLNEVKRCPDELFTTLSAEKQSRFRIISDDHNEVLMKRSSDRFVPLLLQYIDYGKLFDHIRFHVNMGKLRYLLKADKTCIDGQTRVRVIEQPLNGFGRLEEAETMRKQENGTFGNSGIRIRDFENMKRDDANPANYPYIVDTYTHYILENNKVEMFINDKEDSAPLLPVIEDDRYVVKTIPSCRMSTLEIPAMAFHMFLFGSKKTEKLIVDVHNRYKRLFQAMQKEEVTAENIASFGIAESDLPQKILDLISGNAHGKDVDAFIRLTVDDMLTDTERRIKRFKDDRKSIRSADNKMGKRGFKQISTGKLADFLAKDIVLFQPSVNDGENKITGLNYRIMQSAIAVYDSGDDYEAKQQFKLMFEKARLIGKGTTEPHPFLYKVFARSIPANAVEFYERYLIERKFYLTGLSNEIKKGNRVDVPFIRRDQNKWKTPAMKTLGRIYSEDLPVELPRQMFDNEIKSHLKSLPQMEGIDFNNANVTYLIAEYMKRVLDDDFQTFYQWNRNYRYMDMLKGEYDRKGSLQHCFTSVEEREGLWKERASRTERYRKQASNKIRSNRQMRNASSEEIETILDKRLSNSRNEYQKSEKVIRRYRVQDALLFLLAKKTLTELADFDGERFKLKEIMPDAEKGILSEIMPMSFTFEKGGKKYTITSEGMKLKNYGDFFVLASDKRIGNLLELVGSDIVSKED

SEQ ID NO: 50 - protein, 39 aa, Artificial Sequence
  Chemically Synthesized
NSKKRSLEDNETEIKVSRDTWNTKNMRSLEPPRSKKRIH

SEQ ID NO: 51 - protein, 39 aa, Artificial Sequence
  Chemically Synthesized
KSKKRSLEDNETEIEVSRDTWNNKNMRSLEPPRSKKRIN

SEQ ID NO: 52 - protein, 43 aa, Artificial Sequence
  Chemically Synthesized
TMKKRDAETADIGDQSEVESDTEELKKIMFGEKKKLNKKKRKQ

SEQ ID NO: 53 - protein, 9 aa, Artificial Sequence
  Chemically Synthesized
PKKKRKVSS

SEQ ID NO: 54 - protein, 24 aa, Artificial Sequence
  Chemically Synthesized
DPKKKRKVDPKKKRKVDPKKKRKV

SEQ ID NO: 55 - protein, 16 aa, Artificial Sequence
  Chemically Synthesized
KRPAATKKAGQAKKKK

SEQ ID NO: 56 - protein, 37 aa, Artificial Sequence
  Chemically Synthesized
RQKKRVYYDDGLTEEQFLEAVEDDNMSLEDAIKKRRE

SEQ ID NO: 57 - protein, 33 aa, Artificial Sequence
  Chemically Synthesized
NVKKRKRRSKKINKLTDGQIRINHVSSEKKRRE

SEQ ID NO: 58 - protein, 11 aa, Artificial Sequence
  Chemically Synthesized
LQLPPLERLTL

SEQ ID NO: 59 - protein, 16 aa, Artificial Sequence
  Chemically Synthesized
GSLQLPPLERLTLGSS

SEQ ID NO: 60 - protein, 32 aa, Artificial Sequence
  Chemically Synthesized
MSVLTPLLLRGLTGSARRLPVPRAKIHSLGDP

SEQ ID NO: 61 - protein, 130 aa, Artificial Sequence
  Chemically Synthesized
MSVLTPLLLRGLTGSARRLPVPRAKIHSLGDPMSVLTPLLLRGLTGSARRLPVPRAKIHSLGKLATMSVLTPLLLRGLTGSARRLPVPRAKIHSLGDPMSVLTPLLLRGLTGSARRLPVPRAKIHSLGKL

SEQ ID NO: 62 - protein, 20 aa, Artificial Sequence
  Chemically Synthesized
MYRMQLLSCIALSLALVTNS

SEQ ID NO: 63 - protein, 43 aa, Artificial Sequence
  Chemically Synthesized
MGCCFSKTAAKGEAAAERPGEAAVASSPSKANGQENGHVKVGS

SEQ ID NO: 64 - protein, 17 aa, Artificial Sequence
  Chemically Synthesized
MLLPVPLLLGLLGAAAD

SEQ ID NO: 65 - protein, 9 aa, Artificial Sequence
  Chemically Synthesized
GITLGKDEL

SEQ ID NO: 66 - protein, 3 aa, Artificial Sequence
  Chemically Synthesized
SKL

SEQ ID NO: 67 - protein, 22 aa, Artificial Sequence
  Chemically Synthesized
DYKDHDGDYKDHDIDYKDDDDK

SEQ ID NO: 68 - protein, 1155 aa, Artificial Sequence
  Chemically Synthesized
MDYKDHDGDYKDHDIDYKDDDDKGGNSKKRSLEDNETEIKVSRDTWNTKNMRSLEPPRSKKRIHGGNIPALVENQKKYFGTYSVMAMLNAQTVLDHIQKVADIEGEQNENNENLWFHPVMSHLYNAKNGYDKQPEKTMFIIERLQSYFPFLKIMAENQREYSNGKYKQNRVEVNSNDIFEVLKRAFGVLKMYRDLTNHYKTYEEKLNDGCEFLTSTEQPLSGMINNYYTVALRNMNERYGYKTEDLAFIQDKRFKFVKDAYGKKKSQVNTGFFLSLQDYNGDTQKKLHLSGVGIALLICLFLDKQYINIFLSRLPIFSSYNAQSEERRIIIRSFGINSIKLPKDRIHSEKSNKSVAMDMLNEVKRCPDELFTTLSAEKQSRFRIISDDHNEVLMKRSSDRFVPLLLQYIDYGKLFDHIRFHVNMGKLRYLLKADKTCIDGQTRVRVIEQPLNGFGRLEEAETMRKQENGTFGNSGIRIRDFENMKRDDANPANYPYIVDTYTHYILENNKVEMFINDKEDSAPLLPVIEDDRYVVKTIPSCRMSTLEIPAMAFHMFLFGSKKTEKLIVDVHNRYKRLFQAMQKEEVTAENIASFGIAESDLPQKILDLISGNAHGKDVDAFIRLTVDDMLTDTERRIKRFKDDRKSIRSADNKMGKRGFKQISTGKLADFLAKDIVLFQPSVNDGENKITGLNYRIMQSAIAVYDSGDDYEAKQQFKLMFEKARLIGKGTTEPHPFLYKVFARSIPANAVEFYERYLIERKFYLTGLSNEIKKGNRVDVPFIRRDQNKWKTPAMKTLGRIYSEDLPVELPRQMFDNEIKSHLKSLPQMEGIDFNNANVTYLIAEYMKRVLDDDFQTFYQWNRNYRYMDMLKGEYDRKGSLQHCFTSVEEREGLWKERASRTERYRKQASNKIRSNRQMRNASSEEIETILDKRLSNSRNEYQKSEKVIRRYRVQDALLFLLAKKTLTELADFDGERFKLKEIMPDAEKGILSEIMPMSFTFEKGGKKYTITSEGMKLKNYGDFFVLASDKRIGNLLELVGSDIVSKEDIMEEFNKYDQCRPEISSIVFNLEKWAFDTYPELSARVDREEKVDFKSILKILLNNKNINKEQSDILRKIRNAFDHNNYPDKGVVEIKALPEIAMSIKKAFGEYAIMK

SEQ ID NO: 69 - protein, 1155 aa, Artificial Sequence
  Chemically Synthesized
MDYKDHDGDYKDHDIDYKDDDDKGGKSKKRSLEDNETEIEVSRDTWNNKNMRSLEPPRSKKRINGGNIPALVENQKKYFGTYSVMAMLNAQTVLDHIQKVADIEGEQNENNENLWFHPVMSHLYNAKNGYDKQPEKTMFIIERLQSYFPFLKIMAENQREYSNGKYKQNRVEVNSNDIFEVLKRAFGVLKMYRDLTNHYKTYEEKLNDGCEFLTSTEQPLSGMINNYYTVALRNMNERYGYKTEDLAFIQDKRFKFVKDAYGKKKSQVNTGFFLSLQDYNGDTQKKLHLSGVGIALLICLFLDKQYINIFLSRLPIFSSYNAQSEERRIIIRSFGINSIKLPKDRIHSEKSNKSVAMDMLNEVKRCPDELFTTLSAEKQSRFRIISDDHNEVLMKRSSDRFVPLLLQYIDYGKLFDHIRFHVNMGKLRYLLKADKTCIDGQTRVRVIEQPLNGFGRLEEAETMRKQENGTFGNSGIRIRDFENMKRDDANPANYPYIVDTYTHYILENNKVEMFINDKEDSAPLLPVIEDDRYVVKTIPSCRMSTLEIPAMAFHMFLFGSKKTEKLIVDVHNRYKRLFQAMQKEEVTAENIASFGIAESDLPQKILDLISGNAHGKDVDAFIRLTVDDMLTDTERRIKRFKDDRKSIRSADNKMGKRGFKQISTGKLADFLAKDIVLFQPSVNDGENKITGLNYRIMQSAIAVYDSGDDYEAKQQFKLMFEKARLIGKGTTEPHPFLYKVFARSIPANAVEFYERYLIERKFYLTGLSNEIKKGNRVDVPFIRRDQNKWKTPAMKTLGRIYSEDLPVELPRQMFDNEIKSHLKSLPQMEGIDFNNANVTYLIAEYMKRVLDDDFQTFYQWNRNYRYMDMLKGEYDRKGSLQHCFTSVEEREGLWKERASRTERYRKQASNKIRSNRQMRNASSEEIETILDKRLSNSRNEYQKSEKVIRRYRVQDALLFLLAKKTLTELADFDGERFKLKEIMPDAEKGILSEIMPMSFTFEKGGKKYTITSEGMKLKNYGDFFVLASDKRIGNLLELVGSDIVSKEDIMEEFNKYDQCRPEISSIVFNLEKWAFDTYPELSARVDREEKVDFKSILKILLNNKNINKEQSDILRKIRNAFDHNNYPDKGVVEIKALPEIAMSIKKAFGEYAIMK

SEQ ID NO: 70 - protein, 1127 aa, Artificial Sequence
  Chemically Synthesized
MDYKDHDGDYKDHDIDYKDDDDKGGLQLPPLERLTLGGNIPALVENQKKYFGTYSVMAMLNAQTVLDHIQKVADIEGEQNENNENLWFHPVMSHLYNAKNGYDKQPEKTMFIIERLQSYFPFLKIMAENQREYSNGKYKQNRVEVNSNDIFEVLKRAFGVLKMYRDLTNHYKTYEEKLNDGCEFLTSTEQPLSGMINNYYTVALRNMNERYGYKTEDLAFIQDKRFKFVKDAYGKKKSQVNTGFFLSLQDYNGDTQKKLHLSGVGIALLICLFLDKQYINIFLSRLPIFSSYNAQSEERRIIIRSFGINSIKLPKDRIHSEKSNKSVAMDMLNEVKRCPDELFTTLSAEKQSRFRIISDDHNEVLMKRSSDRFVPLLLQYIDYGKLFDHIRFHVNMGKLRYLLKADKTCIDGQTRVRVIEQPLNGFGRLEEAETMRKQENGTFGNSGIRIRDFENMKRDDANPANYPYIVDTYTHYILENNKVEMFINDKEDSAPLLPVIEDDRYVVKTIPSCRMSTLEIPAMAFHMFLFGSKKTEKLIVDVHNRYKRLFQAMQKEEVTAENIASFGIAESDLPQKILDLISGNAHGKDVDAFIRLTVDDMLTDTERRIKRFKDDRKSIRSADNKMGKRGFKQISTGKLADFLAKDIVLFQPSVNDGENKITGLNYRIMQSAIAVYDSGDDYEAKQQFKLMFEKARLIGKGTTEPHPFLYKVFARSIPANAVEFYERYLIERKFYLTGLSNEIKKGNRVDVPFIRRDQNKWKTPAMKTLGRIYSEDLPVELPRQMFDNEIKSHLKSLPQMEGIDFNNANVTYLIAEYMKRVLDDDFQTFYQWNRNYRYMDMLKGEYDRKGSLQHCFTSVEEREGLWKERASRTERYRKQASNKIRSNRQMRNASSEEIETILDKRLSNSRNEYQKSEKVIRRYRVQDALLFLLAKKTLTELADFDGERFKLKEIMPDAEKGILSEIMPMSFTFEKGGKKYTITSEGMKLKNYGDFFVLASDKRIGNLLELVGSDIVSKEDIMEEFNKYDQCRPEISSIVFNLEKWAFDTYPELSARVDREEKVDFKSILKILLNNKNINKEQSDILRKIRNAFDHNNYPDKGVVEIKALPEIAMSIKKAFGEYAIMK

SEQ ID NO: 71 - protein, 1132 aa, Artificial Sequence
  Chemically Synthesized
MDYKDHDGDYKDHDIDYKDDDDKGGGSLQLPPLERLTLGSSGGNIPALVENQKKYFGTYSVMAMLNAQTVLDHIQKVADIEGEQNENNENLWFHPVMSHLYNAKNGYDKQPEKTMFIIERLQSYFPFLKIMAENQREYSNGKYKQNRVEVNSNDIFEVLKRAFGVLKMYRDLTNHYKTYEEKLNDGCEFLTSTEQPLSGMINNYYTVALRNMNERYGYKTEDLAFIQDKRFKFVKDAYGKKKSQVNTGFFLSLQDYNGDTQKKLHLSGVGIALLICLFLDKQYINIFLSRLPIFSSYNAQSEERRIIIRSFGINSIKLPKDRIHSEKSNKSVAMDMLNEVKRCPDELFTTLSAEKQSRFRIISDDHNEVLMKRSSDRFVPLLLQYIDYGKLFDHIRFHVNMGKLRYLLKADKTCIDGQTRVRVIEQPLNGFGRLEEAETMRKQENGTFGNSGIRIRDFENMKRDDANPANYPYIVDTYTHYILENNKVEMFINDKEDSAPLLPVIEDDRYVVKTIPSCRMSTLEIPAMAFHMFLFGSKKTEKLIVDVHNRYKRLFQAMQKEEVTAENIASFGIAESDLPQKILDLISGNAHGKDVDAFIRLTVDDMLTDTERRIKRFKDDRKSIRSADNKMGKRGFKQISTGKLADFLAKDIVLFQPSVNDGENKITGLNYRIMQSAIAVYDSGDDYEAKQQFKLMFEKARLIGKGTTEPHPFLYKVFARSIPANAVEFYERYLIERKFYLTGLSNEIKKGNRVDVPFIRRDQNKWKTPAMKTLGRIYSEDLPVELPRQMFDNEIKSHLKSLPQMEGIDFNNANVTYLIAEYMKRVLDDDFQTFYQWNRNYRYMDMLKGEYDRKGSLQHCFTSVEEREGLWKERASRTERYRKQASNKIRSNRQMRNASSEEIETILDKRLSNSRNEYQKSEKVIRRYRVQDALLFLLAKKTLTELADFDGERFKLKEIMPDAEKGILSEIMPMSFTFEKGGKKYTITSEGMKLKNYGDFFVLASDKRIGNLLELVGSDIVSKEDIMEEFNKYDQCRPEISSIVFNLEKWAFDTYPELSARVDREEKVDFKSILKILLNNKNINKEQSDILRKIRNAFDHNNYPDKGVVEIKALPEIAMSIKKAFGEYAIMK

SEQ ID NO: 72 - protein, 1148 aa, Artificial Sequence
  Chemically Synthesized
MDYKDHDGDYKDHDIDYKDDDDKGGMSVLTPLLLRGLTGSARRLPVPRAKIHSLGDPGGNIPALVENQKKYFGTYSVMAMLNAQTVLDHIQKVADIEGEQNENNENLWFHPVMSHLYNAKNGYDKQPEKTMFIIERLQSYFPFLKIMAENQREYSNGKYKQNRVEVNSNDIFEVLKRAFGVLKMYRDLTNHYKTYEEKLNDGCEFLTSTEQPLSGMINNYYTVALRNMNERYGYKTEDLAFIQDKRFKFVKDAYGKKKSQVNTGFFLSLQDYNGDTQKKLHLSGVGIALLICLFLDKQYINIFLSRLPIFSSYNAQSEERRIIIRSFGINSIKLPKDRIHSEKSNKSVAMDMLNEVKRCPDELFTTLSAEKQSRFRIISDDHNEVLMKRSSDRFVPLLLQYIDYGKLFDHIRFHVNMGKLRYLLKADKTCIDGQTRVRVIEQPLNGFGRLEEAETMRKQENGTFGNSGIRIRDFENMKRDDANPANYPYIVDTYTHYILENNKVEMFINDKEDSAPLLPVIEDDRYVVKTIPSCRMSTLEIPAMAFHMFLFGSKKTEKLIVDVHNRYKRLFQAMQKEEVTAENIASFGIAESDLPQKILDLISGNAHGKDVDAFIRLTVDDMLTDTERRIKRFKDDRKSIRSADNKMGKRGFKQISTGKLADFLAKDIVLFQPSVNDGENKITGLNYRIMQSAIAVYDSGDDYEAKQQFKLMFEKARLIGKGTTEPHPFLYKVFARSIPANAVEFYERYLIERKFYLTGLSNEIKKGNRVDVPFIRRDQNKWKTPAMKTLGRIYSEDLPVELPRQMFDNEIKSHLKSLPQMEGIDFNNANVTYLIAEYMKRVLDDDFQTFYQWNRNYRYMDMLKGEYDRKGSLQHCFTSVEEREGLWKERASRTERYRKQASNKIRSNRQMRNASSEEIETILDKRLSNSRNEYQKSEKVIRRYRVQDALLFLLAKKTLTELADFDGERFKLKEIMPDAEKGILSEIMPMSFTFEKGGKKYTITSEGMKLKNYGDFFVLASDKRIGNLLELVGSDIVSKEDIMEEFNKYDQCRPEISSIVFNLEKWAFDTYPELSARVDREEKVDFKSILKILLNNKNINKEQSDILRKIRNAFDHNNYPDKGVVEIKALPEIAMSIKKAFGEYAIMK

SEQ ID NO: 73 - protein, 1246 aa, Artificial Sequence
  Chemically Synthesized
MDYKDHDGDYKDHDIDYKDDDDKGGMSVLTPLLLRGLTGSARRLPVPRAKIHSLGDPMSVLTPLLLRGLTGSARRLPVPRAKIHSLGKLATMSVLTPLLLRGLTGSARRLPVPRAKIHSLGDPMSVLTPLLLRGLTGSARRLPVPRAKIHSLGKLGGNIPALVENQKKYFGTYSVMAMLNAQTVLDHIQKVADIEGEQNENNENLWFHPVMSHLYNAKNGYDKQPEKTMFIIERLQSYFPFLKIMAENQREYSNGKYKQNRVEVNSNDIFEVLKRAFGVLKMYRDLTNHYKTYEEKLNDGCEFLTSTEQPLSGMINNYYTVALRNMNERYGYKTEDLAFIQDKRFKFVKDAYGKKKSQVNTGFFLSLQDYNGDTQKKLHLSGVGIALLICLFLDKQYINIFLSRLPIFSSYNAQSEERRIIIRSFGINSIKLPKDRIHSEKSNKSVAMDMLNEVKRCPDELFTTLSAEKQSRFRIISDDHNEVLMKRSSDRFVPLLLQYIDYGKLFDHIRFHVNMGKLRYLLKADKTCIDGQTRVRVIEQPLNGFGRLEEAETMRKQENGTFGNSGIRIRDFENMKRDDANPANYPYIVDTYTHYILENNKVEMFINDKEDSAPLLPVIEDDRYVVKTIPSCRMSTLEIPAMAFHMFLFGSKKTEKLIVDVHNRYKRLFQAMQKEEVTAENIASFGIAESDLPQKILDLISGNAHGKDVDAFIRLTVDDMLTDTERRIKRFKDDRKSIRSADNKMGKRGFKQISTGKLADFLAKDIVLFQPSVNDGENKITGLNYRIMQSAIAVYDSGDDYEAKQQFKLMFEKARLIGKGTTEPHPFLYKVFARSIPANAVEFYERYLIERKFYLTGLSNEIKKGNRVDVPFIRRDQNKWKTPAMKTLGRIYSEDLPVELPRQMFDNEIKSHLKSLPQMEGIDFNNANVTYLIAEYMKRVLDDDFQTFYQWNRNYRYMDMLKGEYDRKGSLQHCFTSVEEREGLWKERASRTERYRKQASNKIRSNRQMRNASSEEIETILDKRLSNSRNEYQKSEKVIRRYRVQDALLFLLAKKTLTELADFDGERFKLKEIMPDAEKGILSEIMPMSFTFEKGGKKYTITSEGMKLKNYGDFFVLASDKRIGNLLELVGSDIVSKEDIMEEFNKYDQCRPEISSIVFNLEKWAFDTYPELSARVDREEKVDFKSILKILLNNKNINKEQSDILRKIRNAFDHNNYPDKGVVEIKALPEIAMSIKKAFGEYAIMK

SEQ ID NO: 74 - protein, 1137 aa, Artificial Sequence
  Chemically Synthesized
MDYKDHDGDYKDHDIDYKDDDDKGGMYRMQLLSCIALSLALVTNSLGGNIPALVENQKKYFGTYSVMAMLNAQTVLDHIQKVADIEGEQNENNENLWFHPVMSHLYNAKNGYDKQPEKTMFIIERLQSYFPFLKIMAENQREYSNGKYKQNRVEVNSNDIFEVLKRAFGVLKMYRDLTNHYKTYEEKLNDGCEFLTSTEQPLSGMINNYYTVALRNMNERYGYKTEDLAFIQDKRFKFVKDAYGKKKSQVNTGFFLSLQDYNGDTQKKLHLSGVGIALLICLFLDKQYINIFLSRLPIFSSYNAQSEERRIIIRSFGINSIKLPKDRIHSEKSNKSVAMDMLNEVKRCPDELFTTLSAEKQSRFRIISDDHNEVLMKRSSDRFVPLLLQYIDYGKLFDHIRFHVNMGKLRYLLKADKTCIDGQTRVRVIEQPLNGFGRLEEAETMRKQENGTFGNSGIRIRDFENMKRDDANPANYPYIVDTYTHYILENNKVEMFINDKEDSAPLLPVIEDDRYVVKTIPSCRMSTLEIPAMAFHMFLFGSKKTEKLIVDVHNRYKRLFQAMQKEEVTAENIASFGIAESDLPQKILDLISGNAHGKDVDAFIRLTVDDMLTDTERRIKRFKDDRKSIRSADNKMGKRGFKQISTGKLADFLAKDIVLFQPSVNDGENKITGLNYRIMQSAIAVYDSGDDYEAKQQFKLMFEKARLIGKGTTEPHPFLYKVFARSIPANAVEFYERYLIERKFYLTGLSNEIKKGNRVDVPFIRRDQNKWKTPAMKTLGRIYSEDLPVELPRQMFDNEIKSHLKSLPQMEGIDFNNANVTYLIAEYMKRVLDDDFQTFYQWNRNYRYMDMLKGEYDRKGSLQHCFTSVEEREGLWKERASRTERYRKQASNKIRSNRQMRNASSEEIETILDKRLSNSRNEYQKSEKVIRRYRVQDALLFLLAKKTLTELADFDGERFKLKEIMPDAEKGILSEIMPMSFTFEKGGKKYTITSEGMKLKNYGDFFVLASDKRIGNLLELVGSDIVSKEDIMEEFNKYDQCRPEISSIVFNLEKWAFDTYPELSARVDREEKVDFKSILKILLNNKNINKEQSDILRKIRNAFDHNNYPDKGVVEIKALPEIAMSIKKAFGEYAIMK

SEQ ID NO: 75 - protein, 1159 aa, Artificial Sequence
  Chemically Synthesized
MDYKDHDGDYKDHDIDYKDDDDKGGMGCCFSKTAAKGEAAAERPGEAAVASSPSKANGQENGHVKVGSGGNIPALVENQKKYFGTYSVMAMLNAQTVLDHIQKVADIEGEQNENNENLWFHPVMSHLYNAKNGYDKQPEKTMFIIERLQSYFPFLKIMAENQREYSNGKYKQNRVEVNSNDIFEVLKRAFGVLKMYRDLTNHYKTYEEKLNDGCEFLTSTEQPLSGMINNYYTVALRNMNERYGYKTEDLAFIQDKRFKFVKDAYGKKKSQVNTGFFLSLQDYNGDTQKKLHLSGVGIALLICLFLDKQYINIFLSRLPIFSSYNAQSEERRIIIRSFGINSIKLPKDRIHSEKSNKSVAMDMLNEVKRCPDELFTTLSAEKQSRFRIISDDHNEVLMKRSSDRFVPLLLQYIDYGKLFDHIRFHVNMGKLRYLLKADKTCIDGQTRVRVIEQPLNGFGRLEEAETMRKQENGTFGNSGIRIRDFENMKRDDANPANYPYIVDTYTHYILENNKVEMFINDKEDSAPLLPVIEDDRYVVKTIPSCRMSTLEIPAMAFHMFLFGSKKTEKLIVDVHNRYKRLFQAMQKEEVTAENIASFGIAESDLPQKILDLISGNAHGKDVDAFIRLTVDDMLTDTERRIKRFKDDRKSIRSADNKMGKRGFKQISTGKLADFLAKDIVLFQPSVNDGENKITGLNYRIMQSAIAVYDSGDDYEAKQQFKLMFEKARLIGKGTTEPHPFLYKVFARSIPANAVEFYERYLIERKFYLTGLSNEIKKGNRVDVPFIRRDQNKWKTPAMKTLGRIYSEDLPVELPRQMFDNEIKSHLKSLPQMEGIDFNNANVTYLIAEYMKRVLDDDFQTFYQWNRNYRYMDMLKGEYDRKGSLQHCFTSVEEREGLWKERASRTERYRKQASNKIRSNRQMRNASSEEIETILDKRLSNSRNEYQKSEKVIRRYRVQDALLFLLAKKTLTELADFDGERFKLKEIMPDAEKGILSEIMPMSFTFEKGGKKYTITSEGMKLKNYGDFFVLASDKRIGNLLELVGSDIVSKEDIMEEFNKYDQCRPEISSIVFNLEKWAFDTYPELSARVDREEKVDFKSILKILLNNKNINKEQSDILRKIRNAFDHNNYPDKGVVEIKALPEIAMSIKKAFGEYAIMK

SEQ ID NO: 76 - protein, 1133 aa, Artificial Sequence
  Chemically Synthesized
MDYKDHDGDYKDHDIDYKDDDDKGGMLLPVPLLLGLLGAAADGGNIPALVENQKKYFGTYSVMAMLNAQTVLDHIQKVADIEGEQNENNENLWFHPVMSHLYNAKNGYDKQPEKTMFIIERLQSYFPFLKIMAENQREYSNGKYKQNRVEVNSNDIFEVLKRAFGVLKMYRDLTNHYKTYEEKLNDGCEFLTSTEQPLSGMINNYYTVALRNMNERYGYKTEDLAFIQDKRFKFVKDAYGKKKSQVNTGFFLSLQDYNGDTQKKLHLSGVGIALLICLFLDKQYINIFLSRLPIFSSYNAQSEERRIIIRSFGINSIKLPKDRIHSEKSNKSVAMDMLNEVKRCPDELFTTLSAEKQSRFRIISDDHNEVLMKRSSDRFVPLLLQYIDYGKLFDHIRFHVNMGKLRYLLKADKTCIDGQTRVRVIEQPLNGFGRLEEAETMRKQENGTFGNSGIRIRDFENMKRDDANPANYPYIVDTYTHYILENNKVEMFINDKEDSAPLLPVIEDDRYVVKTIPSCRMSTLEIPAMAFHMFLFGSKKTEKLIVDVHNRYKRLFQAMQKEEVTAENIASFGIAESDLPQKILDLISGNAHGKDVDAFIRLTVDDMLTDTERRIKRFKDDRKSIRSADNKMGKRGFKQISTGKLADFLAKDIVLFQPSVNDGENKITGLNYRIMQSAIAVYDSGDDYEAKQQFKLMFEKARLIGKGTTEPHPFLYKVFARSIPANAVEFYERYLIERKFYLTGLSNEIKKGNRVDVPFIRRDQNKWKTPAMKTLGRIYSEDLPVELPRQMFDNEIKSHLKSLPQMEGIDFNNANVTYLIAEYMKRVLDDDFQTFYQWNRNYRYMDMLKGEYDRKGSLQHCFTSVEEREGLWKERASRTERYRKQASNKIRSNRQMRNASSEEIETILDKRLSNSRNEYQKSEKVIRRYRVQDALLFLLAKKTLTELADFDGERFKLKEIMPDAEKGILSEIMPMSFTFEKGGKKYTITSEGMKLKNYGDFFVLASDKRIGNLLELVGSDIVSKEDIMEEFNKYDQCRPEISSIVFNLEKWAFDTYPELSARVDREEKVDFKSILKILLNNKNINKEQSDILRKIRNAFDHNNYPDKGVVEIKALPEIAMSIKKAFGEYAIMK

SEQ ID NO: 77 - protein, 1125 aa, Artificial Sequence
  Chemically Synthesized
MDYKDHDGDYKDHDIDYKDDDDKGGGITLGKDELGGNIPALVENQKKYFGTYSVMAMLNAQTVLDHIQKVADIEGEQNENNENLWFHPVMSHLYNAKNGYDKQPEKTMFIIERLQSYFPFLKIMAENQREYSNGKYKQNRVEVNSNDIFEVLKRAFGVLKMYRDLTNHYKTYEEKLNDGCEFLTSTEQPLSGMINNYYTVALRNMNERYGYKTEDLAFIQDKRFKFVKDAYGKKKSQVNTGFFLSLQDYNGDTQKKLHLSGVGIALLICLFLDKQYINIFLSRLPIFSSYNAQSEERRIIIRSFGINSIKLPKDRIHSEKSNKSVAMDMLNEVKRCPDELFTTLSAEKQSRFRIISDDHNEVLMKRSSDRFVPLLLQYIDYGKLFDHIRFHVNMGKLRYLLKADKTCIDGQTRVRVIEQPLNGFGRLEEAETMRKQENGTFGNSGIRIRDFENMKRDDANPANYPYIVDTYTHYILENNKVEMFINDKEDSAPLLPVIEDDRYVVKTIPSCRMSTLEIPAMAFHMFLFGSKKTEKLIVDVHNRYKRLFQAMQKEEVTAENIASFGIAESDLPQKILDLISGNAHGKDVDAFIRLTVDDMLTDTERRIKRFKDDRKSIRSADNKMGKRGFKQISTGKLADFLAKDIVLFQPSVNDGENKITGLNYRIMQSAIAVYDSGDDYEAKQQFKLMFEKARLIGKGTTEPHPFLYKVFARSIPANAVEFYERYLIERKFYLTGLSNEIKKGNRVDVPFIRRDQNKWKTPAMKTLGRIYSEDLPVELPRQMFDNEIKSHLKSLPQMEGIDFNNANVTYLIAEYMKRVLDDDFQTFYQWNRNYRYMDMLKGEYDRKGSLQHCFTSVEEREGLWKERASRTERYRKQASNKIRSNRQMRNASSEEIETILDKRLSNSRNEYQKSEKVIRRYRVQDALLFLLAKKTLTELADFDGERFKLKEIMPDAEKGILSEIMPMSFTFEKGGKKYTITSEGMKLKNYGDFFVLASDKRIGNLLELVGSDIVSKEDIMEEFNKYDQCRPEISSIVFNLEKWAFDTYPELSARVDREEKVDFKSILKILLNNKNINKEQSDILRKIRNAFDHNNYPDKGVVEIKALPEIAMSIKKAFGEYAIMK

SEQ ID NO: 78 - protein, 1119 aa, Artificial Sequence
  Chemically Synthesized
MDYKDHDGDYKDHDIDYKDDDDKGGSKLGGNIPALVENQKKYFGTYSVMAMLNAQTVLDHIQKVADIEGEQNENNENLWFHPVMSHLYNAKNGYDKQPEKTMFIIERLQSYFPFLKIMAENQREYSNGKYKQNRVEVNSNDIFEVLKRAFGVLKMYRDLTNHYKTYEEKLNDGCEFLTSTEQPLSGMINNYYTVALRNMNERYGYKTEDLAFIQDKRFKFVKDAYGKKKSQVNTGFFLSLQDYNGDTQKKLHLSGVGIALLICLFLDKQYINIFLSRLPIFSSYNAQSEERRIIIRSFGINSIKLPKDRIHSEKSNKSVAMDMLNEVKRCPDELFTTLSAEKQSRFRIISDDHNEVLMKRSSDRFVPLLLQYIDYGKLFDHIRFHVNMGKLRYLLKADKTCIDGQTRVRVIEQPLNGFGRLEEAETMRKQENGTFGNSGIRIRDFENMKRDDANPANYPYIVDTYTHYILENNKVEMFINDKEDSAPLLPVIEDDRYVVKTIPSCRMSTLEIPAMAFHMFLFGSKKTEKLIVDVHNRYKRLFQAMQKEEVTAENIASFGIAESDLPQKILDLISGNAHGKDVDAFIRLTVDDMLTDTERRIKRFKDDRKSIRSADNKMGKRGFKQISTGKLADFLAKDIVLFQPSVNDGENKITGLNYRIMQSAIAVYDSGDDYEAKQQFKLMFEKARLIGKGTTEPHPFLYKVFARSIPANAVEFYERYLIERKFYLTGLSNEIKKGNRVDVPFIRRDQNKWKTPAMKTLGRIYSEDLPVELPRQMFDNEIKSHLKSLPQMEGIDFNNANVTYLIAEYMKRVLDDDFQTFYQWNRNYRYMDMLKGEYDRKGSLQHCFTSVEEREGLWKERASRTERYRKQASNKIRSNRQMRNASSEEIETILDKRLSNSRNEYQKSEKVIRRYRVQDALLFLLAKKTLTELADFDGERFKLKEIMPDAEKGILSEIMPMSFTFEKGGKKYTITSEGMKLKNYGDFFVLASDKRIGNLLELVGSDIVSKEDIMEEFNKYDQCRPEISSIVFNLEKWAFDTYPELSARVDREEKVDFKSILKILLNNKNINKEQSDILRKIRNAFDHNNYPDKGVVEIKALPEIAMSIKKAFGEYAIMK

SEQ ID NO: 79 - protein, 1048 aa, Artificial Sequence
  Chemically Synthesized
MDYKDHDGDYKDHDIDYKDDDDKGGNSKKRSLEDNETEIKVSRDTWNTKNMRSLEPPRSKKRIHGGNIPALVENQKKYFGTYSVMAMLNAQTVLDHIQKVADIEGEQNENNENLWFHPVMSHLYNAKNGYDKQPEKTMFIIERLQSYFPFLKIMAENQREYSNGKYKQNRVEVNSNDIFEVLKRAFGVLKMYRDLTNHYKTYEEKLNDGCEFLTSTEQPLSGMINNYYTVALRNMNERYGYKTEDLAFIQDKRFKFVKDAYGKKKSQVNTGFFLSLQDYNGDTQKKLHLSGVGIALLICLFLDKQYINIFLSRLPIFSSYNAQSEERRIIIRSFGINSIKLPKDRIHSEKSNKSVAMDMLNEVKRCPDELFTTLSAEKQSRFRIISDDHNEVLMKRSSDRFVPLLLQYIDYGKLFDHIRFHVNMGKLRYLLKADKTCIDGQTRVRVIEQPLNGFGRLEEAETMRKQENGTFGNSGIRIRDFENMKRDDANPANYPYIVDTYTHYILENNKVEMFINDKEDSAPLLPVIEDDRYVVKTIPSCRMSTLEIPAMAFHMFLFGSKKTEKLIVDVHNRYKRLFQAMQKEEVTAENIASFGIAESDLPQKILDLISGNAHGKDVDAFIRLTVDDMLTDTERRIKRFKDDRKSIRSADNKMGKRGFKQISTGKLADFLAKDIVLFQPSVNDGENKITGLNYRIMQSAIAVYDSGDDYEAKQQFKLMFEKARLIGKGTTEPHPFLYKVFARSIPANAVEFYERYLIERKFYLTGLSNEIKKGNRVDVPFIRRDQNKWKTPAMKTLGRIYSEDLPVELPRQMFDNEIKSHLKSLPQMEGIDFNNANVTYLIAEYMKRVLDDDFQTFYQWNRNYRYMDMLKGEYDRKGSLQHCFTSVEEREGLWKERASRTERYRKQASNKIRSNRQMRNASSEEIETILDKRLSNSRNEYQKSEKVIRRYRVQDALLFLLAKKTLTELADFDGERFKLKEIMPDAEKGILSEIMPMSFTFEKGGKKYTITSEGMKLKNYGDFFVLASDKRIGNLLELVGSDIVSKED

SEQ ID NO: 80 - protein, 1048 aa, Artificial Sequence
  Chemically Synthesized
MDYKDHDGDYKDHDIDYKDDDDKGGKSKKRSLEDNETEIEVSRDTWNNKNMRSLEPPRSKKRINGGNIPALVENQKKYFGTYSVMAMLNAQTVLDHIQKVADIEGEQNENNENLWFHPVMSHLYNAKNGYDKQPEKTMFIIERLQSYFPFLKIMAENQREYSNGKYKQNRVEVNSNDIFEVLKRAFGVLKMYRDLTNHYKTYEEKLNDGCEFLTSTEQPLSGMINNYYTVALRNMNERYGYKTEDLAFIQDKRFKFVKDAYGKKKSQVNTGFFLSLQDYNGDTQKKLHLSGVGIALLICLFLDKQYINIFLSRLPIFSSYNAQSEERRIIIRSFGINSIKLPKDRIHSEKSNKSVAMDMLNEVKRCPDELFTTLSAEKQSRFRIISDDHNEVLMKRSSDRFVPLLLQYIDYGKLFDHIRFHVNMGKLRYLLKADKTCIDGQTRVRVIEQPLNGFGRLEEAETMRKQENGTFGNSGIRIRDFENMKRDDANPANYPYIVDTYTHYILENNKVEMFINDKEDSAPLLPVIEDDRYVVKTIPSCRMSTLEIPAMAFHMFLFGSKKTEKLIVDVHNRYKRLFQAMQKEEVTAENIASFGIAESDLPQKILDLISGNAHGKDVDAFIRLTVDDMLTDTERRIKRFKDDRKSIRSADNKMGKRGFKQISTGKLADFLAKDIVLFQPSVNDGENKITGLNYRIMQSAIAVYDSGDDYEAKQQFKLMFEKARLIGKGTTEPHPFLYKVFARSIPANAVEFYERYLIERKFYLTGLSNEIKKGNRVDVPFIRRDQNKWKTPAMKTLGRIYSEDLPVELPRQMFDNEIKSHLKSLPQMEGIDFNNANVTYLIAEYMKRVLDDDFQTFYQWNRNYRYMDMLKGEYDRKGSLQHCFTSVEEREGLWKERASRTERYRKQASNKIRSNRQMRNASSEEIETILDKRLSNSRNEYQKSEKVIRRYRVQDALLFLLAKKTLTELADFDGERFKLKEIMPDAEKGILSEIMPMSFTFEKGGKKYTITSEGMKLKNYGDFFVLASDKRIGNLLELVGSDIVSKED

SEQ ID NO: 81 - protein, 1020 aa, Artificial Sequence
  Chemically Synthesized
MDYKDHDGDYKDHDIDYKDDDDKGGLQLPPLERLTLGGNIPALVENQKKYFGTYSVMAMLNAQTVLDHIQKVADIEGEQNENNENLWFHPVMSHLYNAKNGYDKQPEKTMFIIERLQSYFPFLKIMAENQREYSNGKYKQNRVEVNSNDIFEVLKRAFGVLKMYRDLTNHYKTYEEKLNDGCEFLTSTEQPLSGMINNYYTVALRNMNERYGYKTEDLAFIQDKRFKFVKDAYGKKKSQVNTGFFLSLQDYNGDTQKKLHLSGVGIALLICLFLDKQYINIFLSRLPIFSSYNAQSEERRIIIRSFGINSIKLPKDRIHSEKSNKSVAMDMLNEVKRCPDELFTTLSAEKQSRFRIISDDHNEVLMKRSSDRFVPLLLQYIDYGKLFDHIRFHVNMGKLRYLLKADKTCIDGQTRVRVIEQPLNGFGRLEEAETMRKQENGTFGNSGIRIRDFENMKRDDANPANYPYIVDTYTHYILENNKVEMFINDKEDSAPLLPVIEDDRYVVKTIPSCRMSTLEIPAMAFHMFLFGSKKTEKLIVDVHNRYKRLFQAMQKEEVTAENIASFGIAESDLPQKILDLISGNAHGKDVDAFIRLTVDDMLTDTERRIKRFKDDRKSIRSADNKMGKRGFKQISTGKLADFLAKDIVLFQPSVNDGENKITGLNYRIMQSAIAVYDSGDDYEAKQQFKLMFEKARLIGKGTTEPHPFLYKVFARSIPANAVEFYERYLIERKFYLTGLSNEIKKGNRVDVPFIRRDQNKWKTPAMKTLGRIYSEDLPVELPRQMFDNEIKSHLKSLPQMEGIDFNNANVTYLIAEYMKRVLDDDFQTFYQWNRNYRYMDMLKGEYDRKGSLQHCFTSVEEREGLWKERASRTERYRKQASNKIRSNRQMRNASSEEIETILDKRLSNSRNEYQKSEKVIRRYRVQDALLFLLAKKTLTELADFDGERFKLKEIMPDAEKGILSEIMPMSFTFEKGGKKYTITSEGMKLKNYGDFFVLASDKRIGNLLELVGSDIVSKED

SEQ ID NO: 82 - protein, 1025 aa, Artificial Sequence
  Chemically Synthesized
MDYKDHDGDYKDHDIDYKDDDDKGGGSLQLPPLERLTLGSSGGNIPALVENQKKYFGTYSVMAMLNAQTVLDHIQKVADIEGEQNENNENLWFHPVMSHLYNAKNGYDKQPEKTMFIIERLQSYFPFLKIMAENQREYSNGKYKQNRVEVNSNDIFEVLKRAFGVLKMYRDLTNHYKTYEEKLNDGCEFLTSTEQPLSGMINNYYTVALRNMNERYGYKTEDLAFIQDKRFKFVKDAYGKKKSQVNTGFFLSLQDYNGDTQKKLHLSGVGIALLICLFLDKQYINIFLSRLPIFSSYNAQSEERRIIIRSFGINSIKLPKDRIHSEKSNKSVAMDMLNEVKRCPDELFTTLSAEKQSRFRIISDDHNEVLMKRSSDRFVPLLLQYIDYGKLFDHIRFHVNMGKLRYLLKADKTCIDGQTRVRVIEQPLNGFGRLEEAETMRKQENGTFGNSGIRIRDFENMKRDDANPANYPYIVDTYTHYILENNKVEMFINDKEDSAPLLPVIEDDRYVVKTIPSCRMSTLEIPAMAFHMFLFGSKKTEKLIVDVHNRYKRLFQAMQKEEVTAENIASFGIAESDLPQKILDLISGNAHGKDVDAFIRLTVDDMLTDTERRIKRFKDDRKSIRSADNKMGKRGFKQISTGKLADFLAKDIVLFQPSVNDGENKITGLNYRIMQSAIAVYDSGDDYEAKQQFKLMFEKARLIGKGTTEPHPFLYKVFARSIPANAVEFYERYLIERKFYLTGLSNEIKKGNRVDVPFIRRDQNKWKTPAMKTLGRIYSEDLPVELPRQMFDNEIKSHLKSLPQMEGIDFNNANVTYLIAEYMKRVLDDDFQTFYQWNRNYRYMDMLKGEYDRKGSLQHCFTSVEEREGLWKERASRTERYRKQASNKIRSNRQMRNASSEEIETILDKRLSNSRNEYQKSEKVIRRYRVQDALLFLLAKKTLTELADFDGERFKLKEIMPDAEKGILSEIMPMSFTFEKGGKKYTITSEGMKLKNYGDFFVLASDKRIGNLLELVGSDIVSKED

SEQ ID NO: 83 - protein, 1041 aa, Artificial Sequence
  Chemically Synthesized
MDYKDHDGDYKDHDIDYKDDDDKGGMSVLTPLLLRGLTGSARRLPVPRAKIHSLGDPGGNIPALVENQKKYFGTYSVMAMLNAQTVLDHIQKVADIEGEQNENNENLWFHPVMSHLYNAKNGYDKQPEKTMFIIERLQSYFPFLKIMAENQREYSNGKYKQNRVEVNSNDIFEVLKRAFGVLKMYRDLTNHYKTYEEKLNDGCEFLTSTEQPLSGMINNYYTVALRNMNERYGYKTEDLAFIQDKRFKFVKDAYGKKKSQVNTGFFLSLQDYNGDTQKKLHLSGVGIALLICLFLDKQYINIFLSRLPIFSSYNAQSEERRIIIRSFGINSIKLPKDRIHSEKSNKSVAMDMLNEVKRCPDELFTTLSAEKQSRFRIISDDHNEVLMKRSSDRFVPLLLQYIDYGKLFDHIRFHVNMGKLRYLLKADKTCIDGQTRVRVIEQPLNGFGRLEEAETMRKQENGTFGNSGIRIRDFENMKRDDANPANYPYIVDTYTHYILENNKVEMFINDKEDSAPLLPVIEDDRYVVKTIPSCRMSTLEIPAMAFHMFLFGSKKTEKLIVDVHNRYKRLFQAMQKEEVTAENIASFGIAESDLPQKILDLISGNAHGKDVDAFIRLTVDDMLTDTERRIKRFKDDRKSIRSADNKMGKRGFKQISTGKLADFLAKDIVLFQPSVNDGENKITGLNYRIMQSAIAVYDSGDDYEAKQQFKLMFEKARLIGKGTTEPHPFLYKVFARSIPANAVEFYERYLIERKFYLTGLSNEIKKGNRVDVPFIRRDQNKWKTPAMKTLGRIYSEDLPVELPRQMFDNEIKSHLKSLPQMEGIDFNNANVTYLIAEYMKRVLDDDFQTFYQWNRNYRYMDMLKGEYDRKGSLQHCFTSVEEREGLWKERASRTERYRKQASNKIRSNRQMRNASSEEIETILDKRLSNSRNEYQKSEKVIRRYRVQDALLFLLAKKTLTELADFDGERFKLKEIMPDAEKGILSEIMPMSFTFEKGGKKYTITSEGMKLKNYGDFFVLASDKRIGNLLELVGSDIVSKED

SEQ ID NO: 84 - protein, 1139 aa, Artificial Sequence
  Chemically Synthesized
MDYKDHDGDYKDHDIDYKDDDDKGGMSVLTPLLLRGLTGSARRLPVPRAKIHSLGDPMSVLTPLLLRGLTGSARRLPVPRAKIHSLGKLATMSVLTPLLLRGLTGSARRLPVPRAKIHSLGDPMSVLTPLLLRGLTGSARRLPVPRAKIHSLGKLGGNIPALVENQKKYFGTYSVMAMLNAQTVLDHIQKVADIEGEQNENNENLWFHPVMSHLYNAKNGYDKQPEKTMFIIERLQSYFPFLKIMAENQREYSNGKYKQNRVEVNSNDIFEVLKRAFGVLKMYRDLTNHYKTYEEKLNDGCEFLTSTEQPLSGMINNYYTVALRNMNERYGYKTEDLAFIQDKRFKFVKDAYGKKKSQVNTGFFLSLQDYNGDTQKKLHLSGVGIALLICLFLDKQYINIFLSRLPIFSSYNAQSEERRIIIRSFGINSIKLPKDRIHSEKSNKSVAMDMLNEVKRCPDELFTTLSAEKQSRFRIISDDHNEVLMKRSSDRFVPLLLQYIDYGKLFDHIRFHVNMGKLRYLLKADKTCIDGQTRVRVIEQPLNGFGRLEEAETMRKQENGTFGNSGIRIRDFENMKRDDANPANYPYIVDTYTHYILENNKVEMFINDKEDSAPLLPVIEDDRYVVKTIPSCRMSTLEIPAMAFHMFLFGSKKTEKLIVDVHNRYKRLFQAMQKEEVTAENIASFGIAESDLPQKILDLISGNAHGKDVDAFIRLTVDDMLTDTERRIKRFKDDRKSIRSADNKMGKRGFKQISTGKLADFLAKDIVLFQPSVNDGENKITGLNYRIMQSAIAVYDSGDDYEAKQQFKLMFEKARLIGKGTTEPHPFLYKVFARSIPANAVEFYERYLIERKFYLTGLSNEIKKGNRVDVPFIRRDQNKWKTPAMKTLGRIYSEDLPVELPRQMFDNEIKSHLKSLPQMEGIDFNNANVTYLIAEYMKRVLDDDFQTFYQWNRNYRYMDMLKGEYDRKGSLQHCFTSVEEREGLWKERASRTERYRKQASNKIRSNRQMRNASSEEIETILDKRLSNSRNEYQKSEKVIRRYRVQDALLFLLAKKTLTELADFDGERFKLKEIMPDAEKGILSEIMPMSFTFEKGGKKYTITSEGMKLKNYGDFFVLASDKRIGNLLELVGSDIVSKED

SEQ ID NO: 85 - protein, 1030 aa, Artificial Sequence
  Chemically Synthesized
MDYKDHDGDYKDHDIDYKDDDDKGGMYRMQLLSCIALSLALVTNSLGGNIPALVENQKKYFGTYSVMAMLNAQTVLDHIQKVADIEGEQNENNENLWFHPVMSHLYNAKNGYDKQPEKTMFIIERLQSYFPFLKIMAENQREYSNGKYKQNRVEVNSNDIFEVLKRAFGVLKMYRDLTNHYKTYEEKLNDGCEFLTSTEQPLSGMINNYYTVALRNMNERYGYKTEDLAFIQDKRFKFVKDAYGKKKSQVNTGFFLSLQDYNGDTQKKLHLSGVGIALLICLFLDKQYINIFLSRLPIFSSYNAQSEERRIIIRSFGINSIKLPKDRIHSEKSNKSVAMDMLNEVKRCPDELFTTLSAEKQSRFRIISDDHNEVLMKRSSDRFVPLLLQYIDYGKLFDHIRFHVNMGKLRYLLKADKTCIDGQTRVRVIEQPLNGFGRLEEAETMRKQENGTFGNSGIRIRDFENMKRDDANPANYPYIVDTYTHYILENNKVEMFINDKEDSAPLLPVIEDDRYVVKTIPSCRMSTLEIPAMAFHMFLFGSKKTEKLIVDVHNRYKRLFQAMQKEEVTAENIASFGIAESDLPQKILDLISGNAHGKDVDAFIRLTVDDMLTDTERRIKRFKDDRKSIRSADNKMGKRGFKQISTGKLADFLAKDIVLFQPSVNDGENKITGLNYRIMQSAIAVYDSGDDYEAKQQFKLMFEKARLIGKGTTEPHPFLYKVFARSIPANAVEFYERYLIERKFYLTGLSNEIKKGNRVDVPFIRRDQNKWKTPAMKTLGRIYSEDLPVELPRQMFDNEIKSHLKSLPQMEGIDFNNANVTYLIAEYMKRVLDDDFQTFYQWNRNYRYMDMLKGEYDRKGSLQHCFTSVEEREGLWKERASRTERYRKQASNKIRSNRQMRNASSEEIETILDKRLSNSRNEYQKSEKVIRRYRVQDALLFLLAKKTLTELADFDGERFKLKEIMPDAEKGILSEIMPMSFTFEKGGKKYTITSEGMKLKNYGDFFVLASDKRIGNLLELVGSDIVSKED

SEQ ID NO: 86 - protein, 1052 aa, Artificial Sequence
  Chemically Synthesized
MDYKDHDGDYKDHDIDYKDDDDKGGMGCCFSKTAAKGEAAAERPGEAAVASSPSKANGQENGHVKVGSGGNIPALVENQKKYFGTYSVMAMLNAQTVLDHIQKVADIEGEQNENNENLWFHPVMSHLYNAKNGYDKQPEKTMFIIERLQSYFPFLKIMAENQREYSNGKYKQNRVEVNSNDIFEVLKRAFGVLKMYRDLTNHYKTYEEKLNDGCEFLTSTEQPLSGMINNYYTVALRNMNERYGYKTEDLAFIQDKRFKFVKDAYGKKKSQVNTGFFLSLQDYNGDTQKKLHLSGVGIALLICLFLDKQYINIFLSRLPIFSSYNAQSEERRIIIRSFGINSIKLPKDRIHSEKSNKSVAMDMLNEVKRCPDELFTTLSAEKQSRFRIISDDHNEVLMKRSSDRFVPLLLQYIDYGKLFDHIRFHVNMGKLRYLLKADKTCIDGQTRVRVIEQPLNGFGRLEEAETMRKQENGTFGNSGIRIRDFENMKRDDANPANYPYIVDTYTHYILENNKVEMFINDKEDSAPLLPVIEDDRYVVKTIPSCRMSTLEIPAMAFHMFLFGSKKTEKLIVDVHNRYKRLFQAMQKEEVTAENIASFGIAESDLPQKILDLISGNAHGKDVDAFIRLTVDDMLTDTERRIKRFKDDRKSIRSADNKMGKRGFKQISTGKLADFLAKDIVLFQPSVNDGENKITGLNYRIMQSAIAVYDSGDDYEAKQQFKLMFEKARLIGKGTTEPHPFLYKVFARSIPANAVEFYERYLIERKFYLTGLSNEIKKGNRVDVPFIRRDQNKWKTPAMKTLGRIYSEDLPVELPRQMFDNEIKSHLKSLPQMEGIDFNNANVTYLIAEYMKRVLDDDFQTFYQWNRNYRYMDMLKGEYDRKGSLQHCFTSVEEREGLWKERASRTERYRKQASNKIRSNRQMRNASSEEIETILDKRLSNSRNEYQKSEKVIRRYRVQDALLFLLAKKTLTELADFDGERFKLKEIMPDAEKGILSEIMPMSFTFEKGGKKYTITSEGMKLKNYGDFFVLASDKRIGNLLELVGSDIVSKED

SEQ ID NO: 87 - protein, 1026 aa, Artificial Sequence
  Chemically Synthesized
MDYKDHDGDYKDHDIDYKDDDDKGGMLLPVPLLLGLLGAAADGGNIPALVENQKKYFGTYSVMAMLNAQTVLDHIQKVADIEGEQNENNENLWFHPVMSHLYNAKNGYDKQPEKTMFIIERLQSYFPFLKIMAENQREYSNGKYKQNRVEVNSNDIFEVLKRAFGVLKMYRDLTNHYKTYEEKLNDGCEFLTSTEQPLSGMINNYYTVALRNMNERYGYKTEDLAFIQDKRFKFVKDAYGKKKSQVNTGFFLSLQDYNGDTQKKLHLSGVGIALLICLFLDKQYINIFLSRLPIFSSYNAQSEERRIIIRSFGINSIKLPKDRIHSEKSNKSVAMDMLNEVKRCPDELFTTLSAEKQSRFRIISDDHNEVLMKRSSDRFVPLLLQYIDYGKLFDHIRFHVNMGKLRYLLKADKTCIDGQTRVRVIEQPLNGFGRLEEAETMRKQENGTFGNSGIRIRDFENMKRDDANPANYPYIVDTYTHYILENNKVEMFINDKEDSAPLLPVIEDDRYVVKTIPSCRMSTLEIPAMAFHMFLFGSKKTEKLIVDVHNRYKRLFQAMQKEEVTAENIASFGIAESDLPQKILDLISGNAHGKDVDAFIRLTVDDMLTDTERRIKRFKDDRKSIRSADNKMGKRGFKQISTGKLADFLAKDIVLFQPSVNDGENKITGLNYRIMQSAIAVYDSGDDYEAKQQFKLMFEKARLIGKGTTEPHPFLYKVFARSIPANAVEFYERYLIERKFYLTGLSNEIKKGNRVDVPFIRRDQNKWKTPAMKTLGRIYSEDLPVELPRQMFDNEIKSHLKSLPQMEGIDFNNANVTYLIAEYMKRVLDDDFQTFYQWNRNYRYMDMLKGEYDRKGSLQHCFTSVEEREGLWKERASRTERYRKQASNKIRSNRQMRNASSEEIETILDKRLSNSRNEYQKSEKVIRRYRVQDALLFLLAKKTLTELADFDGERFKLKEIMPDAEKGILSEIMPMSFTFEKGGKKYTITSEGMKLKNYGDFFVLASDKRIGNLLELVGSDIVSKED

SEQ ID NO: 88 - protein, 1018 aa, Artificial Sequence
  Chemically Synthesized
MDYKDHDGDYKDHDIDYKDDDDKGGGITLGKDELGGNIPALVENQKKYFGTYSVMAMLNAQTVLDHIQKVADIEGEQNENNENLWFHPVMSHLYNAKNGYDKQPEKTMFIIERLQSYFPFLKIMAENQREYSNGKYKQNRVEVNSNDIFEVLKRAFGVLKMYRDLTNHYKTYEEKLNDGCEFLTSTEQPLSGMINNYYTVALRNMNERYGYKTEDLAFIQDKRFKFVKDAYGKKKSQVNTGFFLSLQDYNGDTQKKLHLSGVGIALLICLFLDKQYINIFLSRLPIFSSYNAQSEERRIIIRSFGINSIKLPKDRIHSEKSNKSVAMDMLNEVKRCPDELFTTLSAEKQSRFRIISDDHNEVLMKRSSDRFVPLLLQYIDYGKLFDHIRFHVNMGKLRYLLKADKTCIDGQTRVRVIEQPLNGFGRLEEAETMRKQENGTFGNSGIRIRDFENMKRDDANPANYPYIVDTYTHYILENNKVEMFINDKEDSAPLLPVIEDDRYVVKTIPSCRMSTLEIPAMAFHMFLFGSKKTEKLIVDVHNRYKRLFQAMQKEEVTAENIASFGIAESDLPQKILDLISGNAHGKDVDAFIRLTVDDMLTDTERRIKRFKDDRKSIRSADNKMGKRGFKQISTGKLADFLAKDIVLFQPSVNDGENKITGLNYRIMQSAIAVYDSGDDYEAKQQFKLMFEKARLIGKGTTEPHPFLYKVFARSIPANAVEFYERYLIERKFYLTGLSNEIKKGNRVDVPFIRRDQNKWKTPAMKTLGRIYSEDLPVELPRQMFDNEIKSHLKSLPQMEGIDFNNANVTYLIAEYMKRVLDDDFQTFYQWNRNYRYMDMLKGEYDRKGSLQHCFTSVEEREGLWKERASRTERYRKQASNKIRSNRQMRNASSEEIETILDKRLSNSRNEYQKSEKVIRRYRVQDALLFLLAKKTLTELADFDGERFKLKEIMPDAEKGILSEIMPMSFTFEKGGKKYTITSEGMKLKNYGDFFVLASDKRIGNLLELVGSDIVSKED

SEQ ID NO: 89 - protein, 1012 aa, Artificial Sequence
  Chemically Synthesized
MDYKDHDGDYKDHDIDYKDDDDKGGSKLGGNIPALVENQKKYFGTYSVMAMLNAQTVLDHIQKVADIEGEQNENNENLWFHPVMSHLYNAKNGYDKQPEKTMFIIERLQSYFPFLKIMAENQREYSNGKYKQNRVEVNSNDIFEVLKRAFGVLKMYRDLTNHYKTYEEKLNDGCEFLTSTEQPLSGMINNYYTVALRNMNERYGYKTEDLAFIQDKRFKFVKDAYGKKKSQVNTGFFLSLQDYNGDTQKKLHLSGVGIALLICLFLDKQYINIFLSRLPIFSSYNAQSEERRIIIRSFGINSIKLPKDRIHSEKSNKSVAMDMLNEVKRCPDELFTTLSAEKQSRFRIISDDHNEVLMKRSSDRFVPLLLQYIDYGKLFDHIRFHVNMGKLRYLLKADKTCIDGQTRVRVIEQPLNGFGRLEEAETMRKQENGTFGNSGIRIRDFENMKRDDANPANYPYIVDTYTHYILENNKVEMFINDKEDSAPLLPVIEDDRYVVKTIPSCRMSTLEIPAMAFHMFLFGSKKTEKLIVDVHNRYKRLFQAMQKEEVTAENIASFGIAESDLPQKILDLISGNAHGKDVDAFIRLTVDDMLTDTERRIKRFKDDRKSIRSADNKMGKRGFKQISTGKLADFLAKDIVLFQPSVNDGENKITGLNYRIMQSAIAVYDSGDDYEAKQQFKLMFEKARLIGKGTTEPHPFLYKVFARSIPANAVEFYERYLIERKFYLTGLSNEIKKGNRVDVPFIRRDQNKWKTPAMKTLGRIYSEDLPVELPRQMFDNEIKSHLKSLPQMEGIDFNNANVTYLIAEYMKRVLDDDFQTFYQWNRNYRYMDMLKGEYDRKGSLQHCFTSVEEREGLWKERASRTERYRKQASNKIRSNRQMRNASSEEIETILDKRLSNSRNEYQKSEKVIRRYRVQDALLFLLAKKTLTELADFDGERFKLKEIMPDAEKGILSEIMPMSFTFEKGGKKYTITSEGMKLKNYGDFFVLASDKRIGNLLELVGSDIVSKED

SEQ ID NO: 90 - protein, 1034 aa, Artificial Sequence
  Chemically Synthesized
MDYKDHDGDYKDHDIDYKDDDDKGGNSKKRSLEDNETEIKVSRDTWNTKNMRSLEPPRSKKRIHGGIEKKKSFAKGMGVKSTLVSGSKVYMTTFAEGSDARLEKIVEGDSIRSVNEGEAFSAEMADKNAGYKIGNAKFSHPKGYAVVANNPLYTGPVQQDMLGLKETLEKRYFGESADGNDNICIQVIHNILDIEKILAEYITNAAYAVNNISGLDKDIIGFGKFSTVYTYDEFKDPEHHRAAFNNNDKLINAIKAQYDEFDNFLDNPRLGYFGQAFFSKEGRNYIINYGNECYDILALLSGLRHWVVHNNEEESRISRTWLYNLDKNLDNEYISTLNYLYDRITNELTNSFSKNSAANVNYIAETLGINPAEFAEQYFRFSIMKEQKNLGFNITKLREVMLDRKDMSEIRKNHKVFDSIRTKVYTMMDFVIYRYYIEEDAKVAAANKSLPDNEKSLSEKDIFVINLRGSFNDDQKDALYYDEANRIWRKLENIMHNIKEFRGNKTREYKKKDAPRLPRILPAGRDVSAFSKLMYALTMFLDGKEINDLLTTLINKFDNIQSFLKVMPLIGVNAKFVEEYAFFKDSAKIADELRLIKSFARMGEPIADARRAMYIDAIRILGTNLSYDELKALADTFSLDENGNKLKKGKHGMRNFIINNVISNKRFHYLIRYGDPAHLHEIAKNEAVVKFVLGRIADIQKKQGQNGKNQIDRYYETCIGKDKGKSVSEKVDALTKIITGMNYDQFDKKRSVIEDTGRENAEREKFKKIISLYLTVIYHILKNIVNINARYVIGFHCVERDAQLYKEKGYDINLKKLEEKGFSSVTKLCAGIDETAPDKRKDVEKEMAERAKESIDSLESANPKLYANYIKYSDEKKAEEFTRQINREKAKTALNAYLRNTKWNVIIREDLLRIDNKTCTLFRNKAVHLEVARYVHAYINDIAEVNSYFQLYHYIMQRIIMNERYEKSSGKVSEYFDAVNDEKKYNDRLLKLLCVPFGYCIPRFKNLSIEALFDRNEAAKFDKEKKKVSGNSGS

SEQ ID NO: 91 - protein, 1034 aa, Artificial Sequence
  Chemically Synthesized
MDYKDHDGDYKDHDIDYKDDDDKGGKSKKRSLEDNETEIEVSRDTWNNKNMRSLEPPRSKKRINGGIEKKKSFAKGMGVKSTLVSGSKVYMTTFAEGSDARLEKIVEGDSIRSVNEGEAFSAEMADKNAGYKIGNAKFSHPKGYAVVANNPLYTGPVQQDMLGLKETLEKRYFGESADGNDNICIQVIHNILDIEKILAEYITNAAYAVNNISGLDKDIIGFGKFSTVYTYDEFKDPEHHRAAFNNNDKLINAIKAQYDEFDNFLDNPRLGYFGQAFFSKEGRNYIINYGNECYDILALLSGLRHWVVHNNEEESRISRTWLYNLDKNLDNEYISTLNYLYDRITNELTNSFSKNSAANVNYIAETLGINPAEFAEQYFRFSIMKEQKNLGFNITKLREVMLDRKDMSEIRKNHKVFDSIRTKVYTMMDFVIYRYYIEEDAKVAAANKSLPDNEKSLSEKDIFVINLRGSFNDDQKDALYYDEANRIWRKLENIMHNIKEFRGNKTREYKKKDAPRLPRILPAGRDVSAFSKLMYALTMFLDGKEINDLLTTLINKFDNIQSFLKVMPLIGVNAKFVEEYAFFKDSAKIADELRLIKSFARMGEPIADARRAMYIDAIRILGTNLSYDELKALADTFSLDENGNKLKKGKHGMRNFIINNVISNKRFHYLIRYGDPAHLHEIAKNEAVVKFVLGRIADIQKKQGQNGKNQIDRYYETCIGKDKGKSVSEKVDALTKIITGMNYDQFDKKRSVIEDTGRENAEREKFKKIISLYLTVIYHILKNIVNINARYVIGFHCVERDAQLYKEKGYDINLKKLEEKGFSSVTKLCAGIDETAPDKRKDVEKEMAERAKESIDSLESANPKLYANYIKYSDEKKAEEFTRQINREKAKTALNAYLRNTKWNVIIREDLLRIDNKTCTLFRNKAVHLEVARYVHAYINDIAEVNSYFQLYHYIMQRIIMNERYEKSSGKVSEYFDAVNDEKKYNDRLLKLLCVPFGYCIPRFKNLSIEALFDRNEAAKFDKEKKKVSGNSGS

SEQ ID NO: 92 - protein, 1006 aa, Artificial Sequence
  Chemically Synthesized
MDYKDHDGDYKDHDIDYKDDDDKGGLQLPPLERLTLGGIEKKKSFAKGMGVKSTLVSGSKVYMTTFAEGSDARLEKIVEGDSIRSVNEGEAFSAEMADKNAGYKIGNAKFSHPKGYAVVANNPLYTGPVQQDMLGLKETLEKRYFGESADGNDNICIQVIHNILDIEKILAEYITNAAYAVNNISGLDKDIIGFGKFSTVYTYDEFKDPEHHRAAFNNNDKLINAIKAQYDEFDNFLDNPRLGYFGQAFFSKEGRNYIINYGNECYDILALLSGLRHWVVHNNEEESRISRTWLYNLDKNLDNEYISTLNYLYDRITNELTNSFSKNSAANVNYIAETLGINPAEFAEQYFRFSIMKEQKNLGFNITKLREVMLDRKDMSEIRKNHKVFDSIRTKVYTMMDFVIYRYYIEEDAKVAAANKSLPDNEKSLSEKDIFVINLRGSFNDDQKDALYYDEANRIWRKLENIMHNIKEFRGNKTREYKKKDAPRLPRILPAGRDVSAFSKLMYALTMFLDGKEINDLLTTLINKFDNIQSFLKVMPLIGVNAKFVEEYAFFKDSAKIADELRLIKSFARMGEPIADARRAMYIDAIRILGTNLSYDELKALADTFSLDENGNKLKKGKHGMRNFIINNVISNKRFHYLIRYGDPAHLHEIAKNEAVVKFVLGRIADIQKKQGQNGKNQIDRYYETCIGKDKGKSVSEKVDALTKIITGMNYDQFDKKRSVIEDTGRENAEREKFKKIISLYLTVIYHILKNIVNINARYVIGFHCVERDAQLYKEKGYDINLKKLEEKGFSSVTKLCAGIDETAPDKRKDVEKEMAERAKESIDSLESANPKLYANYIKYSDEKKAEEFTRQINREKAKTALNAYLRNTKWNVIIREDLLRIDNKTCTLFRNKAVHLEVARYVHAYINDIAEVNSYFQLYHYIMQRIIMNERYEKSSGKVSEYFDAVNDEKKYNDRLLKLLCVPFGYCIPRFKNLSIEALFDRNEAAKFDKEKKKVSGNSGS

SEQ ID NO: 93 - protein, 1011 aa, Artificial Sequence
  Chemically Synthesized
MDYKDHDGDYKDHDIDYKDDDDKGGGSLQLPPLERLTLGSSGGIEKKKSFAKGMGVKSTLVSGSKVYMTTFAEGSDARLEKIVEGDSIRSVNEGEAFSAEMADKNAGYKIGNAKFSHPKGYAVVANNPLYTGPVQQDMLGLKETLEKRYFGESADGNDNICIQVIHNILDIEKILAEYITNAAYAVNNISGLDKDIIGFGKFSTVYTYDEFKDPEHHRAAFNNNDKLINAIKAQYDEFDNFLDNPRLGYFGQAFFSKEGRNYIINYGNECYDILALLSGLRHWVVHNNEEESRISRTWLYNLDKNLDNEYISTLNYLYDRITNELTNSFSKNSAANVNYIAETLGINPAEFAEQYFRFSIMKEQKNLGFNITKLREVMLDRKDMSEIRKNHKVFDSIRTKVYTMMDFVIYRYYIEEDAKVAAANKSLPDNEKSLSEKDIFVINLRGSFNDDQKDALYYDEANRIWRKLENIMHNIKEFRGNKTREYKKKDAPRLPRILPAGRDVSAFSKLMYALTMFLDGKEINDLLTTLINKFDNIQSFLKVMPLIGVNAKFVEEYAFFKDSAKIADELRLIKSFARMGEPIADARRAMYIDAIRILGTNLSYDELKALADTFSLDENGNKLKKGKHGMRNFIINNVISNKRFHYLIRYGDPAHLHEIAKNEAVVKFVLGRIADIQKKQGQNGKNQIDRYYETCIGKDKGKSVSEKVDALTKIITGMNYDQFDKKRSVIEDTGRENAEREKFKKIISLYLTVIYHILKNIVNINARYVIGFHCVERDAQLYKEKGYDINLKKLEEKGFSSVTKLCAGIDETAPDKRKDVEKEMAERAKESIDSLESANPKLYANYIKYSDEKKAEEFTRQINREKAKTALNAYLRNTKWNVIIREDLLRIDNKTCTLFRNKAVHLEVARYVHAYINDIAEVNSYFQLYHYIMQRIIMNERYEKSSGKVSEYFDAVNDEKKYNDRLLKLLCVPFGYCIPRFKNLSIEALFDRNEAAKFDKEKKKVSGNSGS

SEQ ID NO: 94 - protein, 1027 aa, Artificial Sequence
  Chemically Synthesized
MDYKDHDGDYKDHDIDYKDDDDKGGMSVLTPLLLRGLTGSARRLPVPRAKIHSLGDPGGIEKKKSFAKGMGVKSTLVSGSKVYMTTFAEGSDARLEKIVEGDSIRSVNEGEAFSAEMADKNAGYKIGNAKFSHPKGYAVVANNPLYTGPVQQDMLGLKETLEKRYFGESADGNDNICIQVIHNILDIEKILAEYITNAAYAVNNISGLDKDIIGFGKFSTVYTYDEFKDPEHHRAAFNNNDKLINAIKAQYDEFDNFLDNPRLGYFGQAFFSKEGRNYIINYGNECYDILALLSGLRHWVVHNNEEESRISRTWLYNLDKNLDNEYISTLNYLYDRITNELTNSFSKNSAANVNYIAETLGINPAEFAEQYFRFSIMKEQKNLGFNITKLREVMLDRKDMSEIRKNHKVFDSIRTKVYTMMDFVIYRYYIEEDAKVAAANKSLPDNEKSLSEKDIFVINLRGSFNDDQKDALYYDEANRIWRKLENIMHNIKEFRGNKTREYKKKDAPRLPRILPAGRDVSAFSKLMYALTMFLDGKEINDLLTTLINKFDNIQSFLKVMPLIGVNAKFVEEYAFFKDSAKIADELRLIKSFARMGEPIADARRAMYIDAIRILGTNLSYDELKALADTFSLDENGNKLKKGKHGMRNFIINNVISNKRFHYLIRYGDPAHLHEIAKNEAVVKFVLGRIADIQKKQGQNGKNQIDRYYETCIGKDKGKSVSEKVDALTKIITGMNYDQFDKKRSVIEDTGRENAEREKFKKIISLYLTVIYHILKNIVNINARYVIGFHCVERDAQLYKEKGYDINLKKLEEKGFSSVTKLCAGIDETAPDKRKDVEKEMAERAKESIDSLESANPKLYANYIKYSDEKKAEEFTRQINREKAKTALNAYLRNTKWNVIIREDLLRIDNKTCTLFRNKAVHLEVARYVHAYINDIAEVNSYFQLYHYIMQRIIMNERYEKSSGKVSEYFDAVNDEKKYNDRLLKLLCVPFGYCIPRFKNLSIEALFDRNEAAKFDKEKKKVSGNSGS

SEQ ID NO: 95 - protein, 1125 aa, Artificial Sequence
  Chemically Synthesized
MDYKDHDGDYKDHDIDYKDDDDKGGMSVLTPLLLRGLTGSARRLPVPRAKIHSLGDPMSVLTPLLLRGLTGSARRLPVPRAKIHSLGKLATMSVLTPLLLRGLTGSARRLPVPRAKIHSLGDPMSVLTPLLLRGLTGSARRLPVPRAKIHSLGKLGGIEKKKSFAKGMGVKSTLVSGSKVYMTTFAEGSDARLEKIVEGDSIRSVNEGEAFSAEMADKNAGYKIGNAKFSHPKGYAVVANNPLYTGPVQQDMLGLKETLEKRYFGESADGNDNICIQVIHNILDIEKILAEYITNAAYAVNNISGLDKDIIGFGKFSTVYTYDEFKDPEHHRAAFNNNDKLINAIKAQYDEFDNFLDNPRLGYFGQAFFSKEGRNYIINYGNECYDILALLSGLRHWVVHNNEEESRISRTWLYNLDKNLDNEYISTLNYLYDRITNELTNSFSKNSAANVNYIAETLGINPAEFAEQYFRFSIMKEQKNLGFNITKLREVMLDRKDMSEIRKNHKVFDSIRTKVYTMMDFVIYRYYIEEDAKVAAANKSLPDNEKSLSEKDIFVINLRGSFNDDQKDALYYDEANRIWRKLENIMHNIKEFRGNKTREYKKKDAPRLPRILPAGRDVSAFSKLMYALTMFLDGKEINDLLTTLINKFDNIQSFLKVMPLIGVNAKFVEEYAFFKDSAKIADELRLIKSFARMGEPIADARRAMYIDAIRILGTNLSYDELKALADTFSLDENGNKLKKGKHGMRNFIINNVISNKRFHYLIRYGDPAHLHEIAKNEAVVKFVLGRIADIQKKQGQNGKNQIDRYYETCIGKDKGKSVSEKVDALTKIITGMNYDQFDKKRSVIEDTGRENAEREKFKKIISLYLTVIYHILKNIVNINARYVIGFHCVERDAQLYKEKGYDINLKKLEEKGFSSVTKLCAGIDETAPDKRKDVEKEMAERAKESIDSLESANPKLYANYIKYSDEKKAEEFTRQINREKAKTALNAYLRNTKWNVIIREDLLRIDNKTCTLFRNKAVHLEVARYVHAYINDIAEVNSYFQLYHYIMQRIIMNERYEKSSGKVSEYFDAVNDEKKYNDRLLKLLCVPFGYCIPRFKNLSIEALFDRNEAAKFDKEKKKVSGNSGS

SEQ ID NO: 96 - protein, 1015 aa, Artificial Sequence
  Chemically Synthesized
MDYKDHDGDYKDHDIDYKDDDDKGGMYRMQLLSCIALSLALVTNSGGIEKKKSFAKGMGVKSTLVSGSKVYMTTFAEGSDARLEKIVEGDSIRSVNEGEAFSAEMADKNAGYKIGNAKFSHPKGYAVVANNPLYTGPVQQDMLGLKETLEKRYFGESADGNDNICIQVIHNILDIEKILAEYITNAAYAVNNISGLDKDIIGFGKFSTVYTYDEFKDPEHHRAAFNNNDKLINAIKAQYDEFDNFLDNPRLGYFGQAFFSKEGRNYIINYGNECYDILALLSGLRHWVVHNNEEESRISRTWLYNLDKNLDNEYISTLNYLYDRITNELTNSFSKNSAANVNYIAETLGINPAEFAEQYFRFSIMKEQKNLGFNITKLREVMLDRKDMSEIRKNHKVFDSIRTKVYTMMDFVIYRYYIEEDAKVAAANKSLPDNEKSLSEKDIFVINLRGSFNDDQKDALYYDEANRIWRKLENIMHNIKEFRGNKTREYKKKDAPRLPRILPAGRDVSAFSKLMYALTMFLDGKEINDLLTTLINKFDNIQSFLKVMPLIGVNAKFVEEYAFFKDSAKIADELRLIKSFARMGEPIADARRAMYIDAIRILGTNLSYDELKALADTFSLDENGNKLKKGKHGMRNFIINNVISNKRFHYLIRYGDPAHLHEIAKNEAVVKFVLGRIADIQKKQGQNGKNQIDRYYETCIGKDKGKSVSEKVDALTKIITGMNYDQFDKKRSVIEDTGRENAEREKFKKIISLYLTVIYHILKNIVNINARYVIGFHCVERDAQLYKEKGYDINLKKLEEKGFSSVTKLCAGIDETAPDKRKDVEKEMAERAKESIDSLESANPKLYANYIKYSDEKKAEEFTRQINREKAKTALNAYLRNTKWNVIIREDLLRIDNKTCTLFRNKAVHLEVARYVHAYINDIAEVNSYFQLYHYIMQRIIMNERYEKSSGKVSEYFDAVNDEKKYNDRLLKLLCVPFGYCIPRFKNLSIEALFDRNEAAKFDKEKKKVSGNSGS

SEQ ID NO: 97 - protein, 1038 aa, Artificial Sequence
  Chemically Synthesized
MDYKDHDGDYKDHDIDYKDDDDKGGMGCCFSKTAAKGEAAAERPGEAAVASSPSKANGQENGHVKVGSGGIEKKKSFAKGMGVKSTLVSGSKVYMTTFAEGSDARLEKIVEGDSIRSVNEGEAFSAEMADKNAGYKIGNAKFSHPKGYAVVANNPLYTGPVQQDMLGLKETLEKRYFGESADGNDNICIQVIHNILDIEKILAEYITNAAYAVNNISGLDKDIIGFGKFSTVYTYDEFKDPEHHRAAFNNNDKLINAIKAQYDEFDNFLDNPRLGYFGQAFFSKEGRNYIINYGNECYDILALLSGLRHWVVHNNEEESRISRTWLYNLDKNLDNEYISTLNYLYDRITNELTNSFSKNSAANVNYIAETLGINPAEFAEQYFRFSIMKEQKNLGFNITKLREVMLDRKDMSEIRKNHKVFDSIRTKVYTMMDFVIYRYYIEEDAKVAAANKSLPDNEKSLSEKDIFVINLRGSFNDDQKDALYYDEANRIWRKLENIMHNIKEFRGNKTREYKKKDAPRLPRILPAGRDVSAFSKLMYALTMFLDGKEINDLLTTLINKFDNIQSFLKVMPLIGVNAKFVEEYAFFKDSAKIADELRLIKSFARMGEPIADARRAMYIDAIRILGTNLSYDELKALADTFSLDENGNKLKKGKHGMRNFIINNVISNKRFHYLIRYGDPAHLHEIAKNEAVVKFVLGRIADIQKKQGQNGKNQIDRYYETCIGKDKGKSVSEKVDALTKIITGMNYDQFDKKRSVIEDTGRENAEREKFKKIISLYLTVIYHILKNIVNINARYVIGFHCVERDAQLYKEKGYDINLKKLEEKGFSSVTKLCAGIDETAPDKRKDVEKEMAERAKESIDSLESANPKLYANYIKYSDEKKAEEFTRQINREKAKTALNAYLRNTKWNVIIREDLLRIDNKTCTLFRNKAVHLEVARYVHAYINDIAEVNSYFQLYHYIMQRIIMNERYEKSSGKVSEYFDAVNDEKKYNDRLLKLLCVPFGYCIPRFKNLSIEALFDRNEAAKFDKEKKKVSGNSGS

SEQ ID NO: 98 - protein, 1012 aa, Artificial Sequence
  Chemically Synthesized
MDYKDHDGDYKDHDIDYKDDDDKGGMLLPVPLLLGLLGAAADGGIEKKKSFAKGMGVKSTLVSGSKVYMTTFAEGSDARLEKIVEGDSIRSVNEGEAFSAEMADKNAGYKIGNAKFSHPKGYAVVANNPLYTGPVQQDMLGLKETLEKRYFGESADGNDNICIQVIHNILDIEKILAEYITNAAYAVNNISGLDKDIIGFGKFSTVYTYDEFKDPEHHRAAFNNNDKLINAIKAQYDEFDNFLDNPRLGYFGQAFFSKEGRNYIINYGNECYDILALLSGLRHWVVHNNEEESRISRTWLYNLDKNLDNEYISTLNYLYDRITNELTNSFSKNSAANVNYIAETLGINPAEFAEQYFRFSIMKEQKNLGFNITKLREVMLDRKDMSEIRKNHKVFDSIRTKVYTMMDFVIYRYYIEEDAKVAAANKSLPDNEKSLSEKDIFVINLRGSFNDDQKDALYYDEANRIWRKLENIMHNIKEFRGNKTREYKKKDAPRLPRILPAGRDVSAFSKLMYALTMFLDGKEINDLLTTLINKFDNIQSFLKVMPLIGVNAKFVEEYAFFKDSAKIADELRLIKSFARMGEPIADARRAMYIDAIRILGTNLSYDELKALADTFSLDENGNKLKKGKHGMRNFIINNVISNKRFHYLIRYGDPAHLHEIAKNEAVVKFVLGRIADIQKKQGQNGKNQIDRYYETCIGKDKGKSVSEKVDALTKIITGMNYDQFDKKRSVIEDTGRENAEREKFKKIISLYLTVIYHILKNIVNINARYVIGFHCVERDAQLYKEKGYDINLKKLEEKGFSSVTKLCAGIDETAPDKRKDVEKEMAERAKESIDSLESANPKLYANYIKYSDEKKAEEFTRQINREKAKTALNAYLRNTKWNVIIREDLLRIDNKTCTLFRNKAVHLEVARYVHAYINDIAEVNSYFQLYHYIMQRIIMNERYEKSSGKVSEYFDAVNDEKKYNDRLLKLLCVPFGYCIPRFKNLSIEALFDRNEAAKFDKEKKKVSGNSGS

SEQ ID NO: 99 - protein, 1004 aa, Artificial Sequence
  Chemically Synthesized
MDYKDHDGDYKDHDIDYKDDDDKGGGITLGKDELGGIEKKKSFAKGMGVKSTLVSGSKVYMTTFAEGSDARLEKIVEGDSIRSVNEGEAFSAEMADKNAGYKIGNAKFSHPKGYAVVANNPLYTGPVQQDMLGLKETLEKRYFGESADGNDNICIQVIHNILDIEKILAEYITNAAYAVNNISGLDKDIIGFGKFSTVYTYDEFKDPEHHRAAFNNNDKLINAIKAQYDEFDNFLDNPRLGYFGQAFFSKEGRNYIINYGNECYDILALLSGLRHWVVHNNEEESRISRTWLYNLDKNLDNEYISTLNYLYDRITNELTNSFSKNSAANVNYIAETLGINPAEFAEQYFRFSIMKEQKNLGFNITKLREVMLDRKDMSEIRKNHKVFDSIRTKVYTMMDFVIYRYYIEEDAKVAAANKSLPDNEKSLSEKDIFVINLRGSFNDDQKDALYYDEANRIWRKLENIMHNIKEFRGNKTREYKKKDAPRLPRILPAGRDVSAFSKLMYALTMFLDGKEINDLLTTLINKFDNIQSFLKVMPLIGVNAKFVEEYAFFKDSAKIADELRLIKSFARMGEPIADARRAMYIDAIRILGTNLSYDELKALADTFSLDENGNKLKKGKHGMRNFIINNVISNKRFHYLIRYGDPAHLHEIAKNEAVVKFVLGRIADIQKKQGQNGKNQIDRYYETCIGKDKGKSVSEKVDALTKIITGMNYDQFDKKRSVIEDTGRENAEREKFKKIISLYLTVIYHILKNIVNINARYVIGFHCVERDAQLYKEKGYDINLKKLEEKGFSSVTKLCAGIDETAPDKRKDVEKEMAERAKESIDSLESANPKLYANYIKYSDEKKAEEFTRQINREKAKTALNAYLRNTKWNVIIREDLLRIDNKTCTLFRNKAVHLEVARYVHAYINDIAEVNSYFQLYHYIMQRIIMNERYEKSSGKVSEYFDAVNDEKKYNDRLLKLLCVPFGYCIPRFKNLSIEALFDRNEAAKFDKEKKKVSGNSGS

SEQ ID NO: 100 - protein, 998 aa, Artificial Sequence
  Chemically Synthesized
MDYKDHDGDYKDHDIDYKDDDDKGGSKLGGIEKKKSFAKGMGVKSTLVSGSKVYMTTFAEGSDARLEKIVEGDSIRSVNEGEAFSAEMADKNAGYKIGNAKFSHPKGYAVVANNPLYTGPVQQDMLGLKETLEKRYFGESADGNDNICIQVIHNILDIEKILAEYITNAAYAVNNISGLDKDIIGFGKFSTVYTYDEFKDPEHHRAAFNNNDKLINAIKAQYDEFDNFLDNPRLGYFGQAFFSKEGRNYIINYGNECYDILALLSGLRHWVVHNNEEESRISRTWLYNLDKNLDNEYISTLNYLYDRITNELTNSFSKNSAANVNYIAETLGINPAEFAEQYFRFSIMKEQKNLGFNITKLREVMLDRKDMSEIRKNHKVFDSIRTKVYTMMDFVIYRYYIEEDAKVAAANKSLPDNEKSLSEKDIFVINLRGSFNDDQKDALYYDEANRIWRKLENIMHNIKEFRGNKTREYKKKDAPRLPRILPAGRDVSAFSKLMYALTMFLDGKEINDLLTTLINKFDNIQSFLKVMPLIGVNAKFVEEYAFFKDSAKIADELRLIKSFARMGEPIADARRAMYIDAIRILGTNLSYDELKALADTFSLDENGNKLKKGKHGMRNFIINNVISNKRFHYLIRYGDPAHLHEIAKNEAVVKFVLGRIADIQKKQGQNGKNQIDRYYETCIGKDKGKSVSEKVDALTKIITGMNYDQFDKKRSVIEDTGRENAEREKFKKIISLYLTVIYHILKNIVNINARYVIGFHCVERDAQLYKEKGYDINLKKLEEKGFSSVTKLCAGIDETAPDKRKDVEKEMAERAKESIDSLESANPKLYANYIKYSDEKKAEEFTRQINREKAKTALNAYLRNTKWNVIIREDLLRIDNKTCTLFRNKAVHLEVARYVHAYINDIAEVNSYFQLYHYIMQRIIMNERYEKSSGKVSEYFDAVNDEKKYNDRLLKLLCVPFGYCIPRFKNLSIEALFDRNEAAKFDKEKKKVSGNSGS

SEQ ID NO: 101 - protein, 1273 aa, Artificial Sequence
  Chemically Synthesized
MFVFLVLLPLVSSQCVNLTTRTQLPPAYTNSFTRGVYYPDKVFRSSVLHSTQDLFLPFFSNVTWFHAIHVSGTNGTKRFDNPVLPFNDGVYFASTEKSNIIRGWIFGTTLDSKTQSLLIVNNATNVVIKVCEFQFCNDPFLGVYYHKNNKSWMESEFRVYSSANNCTFEYVSQPFLMDLEGKQGNFKNLREFVFKNIDGYFKIYSKHTPINLVRDLPQGFSALEPLVDLPIGINITRFQTLLALHRSYLTPGDSSSGWTAGAAAYYVGYLQPRTFLLKYNENGTITDAVDCALDPLSETKCTLKSFTVEKGIYQTSNFRVQPTESIVRFPNITNLCPFGEVFNATRFASVYAWNRKRISNCVADYSVLYNSASFSTFKCYGVSPTKLNDLCFTNVYADSFVIRGDEVRQIAPGQTGKIADYNYKLPDDFTGCVIAWNSNNLDSKVGGNYNYLYRLFRKSNLKPFERDISTEIYQAGSTPCNGVEGFNCYFPLQSYGFQPTNGVGYQPYRVVVLSFELLHAPATVCGPKKSTNLVKNKCVNFNFNGLTGTGVLTESNKKFLPFQQFGRDIADTTDAVRDPQTLEILDITPCSFGGVSVITPGTNTSNQVAVLYQDVNCTEVPVAIHADQLTPTWRVYSTGSNVFQTRAGCLIGAEHVNNSYECDIPIGAGICASYQTQTNSPRRARSVASQSIIAYTMSLGAENSVAYSNNSIAIPTNFTISVTTEILPVSMTKTSVDCTMYICGDSTECSNLLLQYGSFCTQLNRALTGIAVEQDKNTQEVFAQVKQIYKTPPIKDFGGFNFSQILPDPSKPSKRSFIEDLLFNKVTLADAGFIKQYGDCLGDIAARDLICAQKFNGLTVLPPLLTDEMIAQYTSALLAGTITSGWTFGAGAALQIPFAMQMAYRFNGIGVTQNVLYENQKLIANQFNSAIGKIQDSLSSTASALGKLQDVVNQNAQALNTLVKQLSSNFGAISSVLNDILSRLDKVEAEVQIDRLITGRLQSLQTYVTQQLIRAAEIRASANLAATKMSECVLGQSKRVDFCGKGYHLMSFPQSAPHGVVFLHVTYVPAQEKNFTTAPAICHDGKAHFPREGVFVSNGTHWFVTQRNFYEPQIITTDNTFVSGNCDVVIGIVNNTVYDPLQPELDSFKEELDKYFKNHTSPDVDLGDISGINASVVNIQKEIDRLNEVAKNLNESLIDLQELGKYEQYIKWPWYIWLGFIAGLIAIVMVTIMLCCMTSCCSCLKGCCSCGSCCKFDEDDSEPVLKGVKLHYT

SEQ ID NO: 102 - protein, 1246 aa, Artificial Sequence
  Chemically Synthesized
MFVFLVLLPLVSSQCVNLTTRTQLPPAYTNSFTRGVYYPDKVFRSSVLHSTQDLFLPFFSNVTWFHAIHVSGTNGTKRFDNPVLPFNDGVYFASTEKSNIIRGWIFGTTLDSKTQSLLIVNNATNVVIKVCEFQFCNDPFLGVYYHKNNKSWMESEFRVYSSANNCTFEYVSQPFLMDLEGKQGNFKNLREFVFKNIDGYFKIYSKHTPINLVRDLPQGFSALEPLVDLPIGINITRFQTLLALHRSYLTPGDSSSGWTAGAAAYYVGYLQPRTFLLKYNENGTITDAVDCALDPLSETKCTLKSFTVEKGIYQTSNFRVQPTESIVRFPNITNLCPFGEVFNATRFASVYAWNRKRISNCVADYSVLYNSASFSTFKCYGVSPTKLNDLCFTNVYADSFVIRGDEVRQIAPGQTGKIADYNYKLPDDFTGCVIAWNSNNLDSKVGGNYNYLYRLFRKSNLKPFERDISTEIYQAGSTPCNGVEGFNCYFPLQSYGFQPTNGVGYQPYRVVVLSFELLHAPATVCGPKKSTNLVKNKCVNFNFNGLTGTGVLTESNKKFLPFQQFGRDIADTTDAVRDPQTLEILDITPCSFGGVSVITPGTNTSNQVAVLYQDVNCTEVPVAIHADQLTPTWRVYSTGSNVFQTRAGCLIGAEHVNNSYECDIPIGAGICASYQTQTNSPRRARSVASQSIIAYTMSLGAENSVAYSNNSIAIPTNFTISVTTEILPVSMTKTSVDCTMYICGDSTECSNLLLQYGSFCTQLNRALTGIAVEQDKNTQEVFAQVKQIYKTPPIKDFGGFNFSQILPDPSKPSKRSFIEDLLFNKVTLADAGFIKQYGDCLGDIAARDLICAQKFNGLTVLPPLLTDEMIAQYTSALLAGTITSGWTFGAGAALQIPFAMQMAYRFNGIGVTQNVLYENQKLIANQFNSAIGKIQDSLSSTASALGKLQDVVNQNAQALNTLVKQLSSNFGAISSVLNDILSRLDKVEAEVQIDRLITGRLQSLQTYVTQQLIRAAEIRASANLAATKMSECVLGQSKRVDFCGKGYHLMSFPQSAPHGVVFLHVTYVPAQEKNFTTAPAICHDGKAHFPREGVFVSNGTHWFVTQRNFYEPQIITTDNTFVSGNCDVVIGIVNNTVYDPLQPELDSFKEELDKYFKNHTSPDVDLGDISGINASVVNIQKEIDRLNEVAKNLNESLIDLQELGKYEQYIKWPWYIWLGFIAGLIAIVMVTIMLCCMTSCCSCLKG

SEQ ID NO: 103 - protein, 1254 aa, Artificial Sequence
  Chemically Synthesized
MFVFLVLLPLVSSQCVNLTTRTQLPPAYTNSFTRGVYYPDKVFRSSVLHSTQDLFLPFFSNVTWFHAIHVSGTNGTKRFDNPVLPFNDGVYFASTEKSNIIRGWIFGTTLDSKTQSLLIVNNATNVVIKVCEFQFCNDPFLGVYYHKNNKSWMESEFRVYSSANNCTFEYVSQPFLMDLEGKQGNFKNLREFVFKNIDGYFKIYSKHTPINLVRDLPQGFSALEPLVDLPIGINITRFQTLLALHRSYLTPGDSSSGWTAGAAAYYVGYLQPRTFLLKYNENGTITDAVDCALDPLSETKCTLKSFTVEKGIYQTSNFRVQPTESIVRFPNITNLCPFGEVFNATRFASVYAWNRKRISNCVADYSVLYNSASFSTFKCYGVSPTKLNDLCFTNVYADSFVIRGDEVRQIAPGQTGKIADYNYKLPDDFTGCVIAWNSNNLDSKVGGNYNYLYRLFRKSNLKPFERDISTEIYQAGSTPCNGVEGFNCYFPLQSYGFQPTNGVGYQPYRVVVLSFELLHAPATVCGPKKSTNLVKNKCVNFNFNGLTGTGVLTESNKKFLPFQQFGRDIADTTDAVRDPQTLEILDITPCSFGGVSVITPGTNTSNQVAVLYQDVNCTEVPVAIHADQLTPTWRVYSTGSNVFQTRAGCLIGAEHVNNSYECDIPIGAGICASYQTQTNSPRRARSVASQSIIAYTMSLGAENSVAYSNNSIAIPTNFTISVTTEILPVSMTKTSVDCTMYICGDSTECSNLLLQYGSFCTQLNRALTGIAVEQDKNTQEVFAQVKQIYKTPPIKDFGGFNFSQILPDPSKPSKRSFIEDLLFNKVTLADAGFIKQYGDCLGDIAARDLICAQKFNGLTVLPPLLTDEMIAQYTSALLAGTITSGWTFGAGAALQIPFAMQMAYRFNGIGVTQNVLYENQKLIANQFNSAIGKIQDSLSSTASALGKLQDVVNQNAQALNTLVKQLSSNFGAISSVLNDILSRLDKVEAEVQIDRLITGRLQSLQTYVTQQLIRAAEIRASANLAATKMSECVLGQSKRVDFCGKGYHLMSFPQSAPHGVVFLHVTYVPAQEKNFTTAPAICHDGKAHFPREGVFVSNGTHWFVTQRNFYEPQIITTDNTFVSGNCDVVIGIVNNTVYDPLQPELDSFKEELDKYFKNHTSPDVDLGDISGINASVVNIQKEIDRLNEVAKNLNESLIDLQELGKYEQYIKWPWYIWLGFIAGLIAIVMVTIMLCCMTSCCSCLKGNRVRQGYS

SEQ ID NO: 104 - protein, 1255 aa, Artificial Sequence
  Chemically Synthesized
MFVFLVLLPLVSSQCVNLTTRTQLPPAYTNSFTRGVYYPDKVFRSSVLHSTQDLFLPFFSNVTWFHAIHVSGTNGTKRFDNPVLPFNDGVYFASTEKSNIIRGWIFGTTLDSKTQSLLIVNNATNVVIKVCEFQFCNDPFLGVYYHKNNKSWMESEFRVYSSANNCTFEYVSQPFLMDLEGKQGNFKNLREFVFKNIDGYFKIYSKHTPINLVRDLPQGFSALEPLVDLPIGINITRFQTLLALHRSYLTPGDSSSGWTAGAAAYYVGYLQPRTFLLKYNENGTITDAVDCALDPLSETKCTLKSFTVEKGIYQTSNFRVQPTESIVRFPNITNLCPFGEVFNATRFASVYAWNRKRISNCVADYSVLYNSASFSTFKCYGVSPTKLNDLCFTNVYADSFVIRGDEVRQIAPGQTGKIADYNYKLPDDFTGCVIAWNSNNLDSKVGGNYNYLYRLFRKSNLKPFERDISTEIYQAGSTPCNGVEGFNCYFPLQSYGFQPTNGVGYQPYRVVVLSFELLHAPATVCGPKKSTNLVKNKCVNFNFNGLTGTGVLTESNKKFLPFQQFGRDIADTTDAVRDPQTLEILDITPCSFGGVSVITPGTNTSNQVAVLYQDVNCTEVPVAIHADQLTPTWRVYSTGSNVFQTRAGCLIGAEHVNNSYECDIPIGAGICASYQTQTNSPRRARSVASQSIIAYTMSLGAENSVAYSNNSIAIPTNFTISVTTEILPVSMTKTSVDCTMYICGDSTECSNLLLQYGSFCTQLNRALTGIAVEQDKNTQEVFAQVKQIYKTPPIKDFGGFNFSQILPDPSKPSKRSFIEDLLFNKVTLADAGFIKQYGDCLGDIAARDLICAQKFNGLTVLPPLLTDEMIAQYTSALLAGTITSGWTFGAGAALQIPFAMQMAYRFNGIGVTQNVLYENQKLIANQFNSAIGKIQDSLSSTASALGKLQDVVNQNAQALNTLVKQLSSNFGAISSVLNDILSRLDKVEAEVQIDRLITGRLQSLQTYVTQQLIRAAEIRASANLAATKMSECVLGQSKRVDFCGKGYHLMSFPQSAPHGVVFLHVTYVPAQEKNFTTAPAICHDGKAHFPREGVFVSNGTHWFVTQRNFYEPQIITTDNTFVSGNCDVVIGIVNNTVYDPLQPELDSFKEELDKYFKNHTSPDVDLGDISGINASVVNIQKEIDRLNEVAKNLNESLIDLQELGKYEQYIKWPWYIWLGFIAGLIAIVMVTIMLKLKHTKKRQIYTDIEMNRLGK

SEQ ID NO: 105 - protein, 1385 aa, Artificial Sequence
  Chemically Synthesized
MFVFLVLLPLVSSQCVNLTTRTQLPPAYTNSFTRGVYYPDKVFRSSVLHSTQDLFLPFFSNVTWFHAIHVSGTNGTKRFDNPVLPFNDGVYFASTEKSNIIRGWIFGTTLDSKTQSLLIVNNATNVVIKVCEFQFCNDPFLGVYYHKNNKSWMESEFRVYSSANNCTFEYVSQPFLMDLEGKQGNFKNLREFVFKNIDGYFKIYSKHTPINLVRDLPQGFSALEPLVDLPIGINITRFQTLLALHRSYLTPGDSSSGWTAGAAAYYVGYLQPRTFLLKYNENGTITDAVDCALDPLSETKCTLKSFTVEKGIYQTSNFRVQPTESIVRFPNITNLCPFGEVFNATRFASVYAWNRKRISNCVADYSVLYNSASFSTFKCYGVSPTKLNDLCFTNVYADSFVIRGDEVRQIAPGQTGKIADYNYKLPDDFTGCVIAWNSNNLDSKVGGNYNYLYRLFRKSNLKPFERDISTEIYQAGSTPCNGVEGFNCYFPLQSYGFQPTNGVGYQPYRVVVLSFELLHAPATVCGPKKSTNLVKNKCVNFNFNGLTGTGVLTESNKKFLPFQQFGRDIADTTDAVRDPQTLEILDITPCSFGGVSVITPGTNTSNQVAVLYQDVNCTEVPVAIHADQLTPTWRVYSTGSNVFQTRAGCLIGAEHVNNSYECDIPIGAGICASYQTQTNSPRRARSVASQSIIAYTMSLGAENSVAYSNNSIAIPTNFTISVTTEILPVSMTKTSVDCTMYICGDSTECSNLLLQYGSFCTQLNRALTGIAVEQDKNTQEVFAQVKQIYKTPPIKDFGGFNFSQILPDPSKPSKRSFIEDLLFNKVTLADAGFIKQYGDCLGDIAARDLICAQKFNGLTVLPPLLTDEMIAQYTSALLAGTITSGWTFGAGAALQIPFAMQMAYRFNGIGVTQNVLYENQKLIANQFNSAIGKIQDSLSSTASALGKLQDVVNQNAQALNTLVKQLSSNFGAISSVLNDILSRLDKVEAEVQIDRLITGRLQSLQTYVTQQLIRAAEIRASANLAATKMSECVLGQSKRVDFCGKGYHLMSFPQSAPHGVVFLHVTYVPAQEKNFTTAPAICHDGKAHFPREGVFVSNGTHWFVTQRNFYEPQIITTDNTFVSGNCDVVIGIVNNTVYDPLQPELDSFKEELDKYFKNHTSPDVDLGDISGINASVVNIQKEIDRLNEVAKNLNESLIDLQELGKYEQYIKWPWYIWLGFIAGLIAIVMVTIMLNRVRQGYSPLSFQTLTPVPRGPDRPEGTEEGGGEQDRNRSIRLVSGFLALAWDDLRSLCLFSYHRLRDLILIATRIVELLGHRGWEAIKYLWNLLLYWGRELKISAINLIDTIAIVVAGWTDRVIEIGQGIGRAILHIPRRIRQGLERSLL

SEQ ID NO: 106 - protein, 1392 aa, Artificial Sequence
  Chemically Synthesized
MFVFLVLLPLVSSQCVNLTTRTQLPPAYTNSFTRGVYYPDKVFRSSVLHSTQDLFLPFFSNVTWFHAIHVSGTNGTKRFDNPVLPFNDGVYFASTEKSNIIRGWIFGTTLDSKTQSLLIVNNATNVVIKVCEFQFCNDPFLGVYYHKNNKSWMESEFRVYSSANNCTFEYVSQPFLMDLEGKQGNFKNLREFVFKNIDGYFKIYSKHTPINLVRDLPQGFSALEPLVDLPIGINITRFQTLLALHRSYLTPGDSSSGWTAGAAAYYVGYLQPRTFLLKYNENGTITDAVDCALDPLSETKCTLKSFTVEKGIYQTSNFRVQPTESIVRFPNITNLCPFGEVFNATRFASVYAWNRKRISNCVADYSVLYNSASFSTFKCYGVSPTKLNDLCFTNVYADSFVIRGDEVRQIAPGQTGKIADYNYKLPDDFTGCVIAWNSNNLDSKVGGNYNYLYRLFRKSNLKPFERDISTEIYQAGSTPCNGVEGFNCYFPLQSYGFQPTNGVGYQPYRVVVLSFELLHAPATVCGPKKSTNLVKNKCVNFNFNGLTGTGVLTESNKKFLPFQQFGRDIADTTDAVRDPQTLEILDITPCSFGGVSVITPGTNTSNQVAVLYQDVNCTEVPVAIHADQLTPTWRVYSTGSNVFQTRAGCLIGAEHVNNSYECDIPIGAGICASYQTQTNSPRRARSVASQSIIAYTMSLGAENSVAYSNNSIAIPTNFTISVTTEILPVSMTKTSVDCTMYICGDSTECSNLLLQYGSFCTQLNRALTGIAVEQDKNTQEVFAQVKQIYKTPPIKDFGGFNFSQILPDPSKPSKRSFIEDLLFNKVTLADAGFIKQYGDCLGDIAARDLICAQKFNGLTVLPPLLTDEMIAQYTSALLAGTITSGWTFGAGAALQIPFAMQMAYRFNGIGVTQNVLYENQKLIANQFNSAIGKIQDSLSSTASALGKLQDVVNQNAQALNTLVKQLSSNFGAISSVLNDILSRLDKVEAEVQIDRLITGRLQSLQTYVTQQLIRAAEIRASANLAATKMSECVLGQSKRVDFCGKGYHLMSFPQSAPHGVVFLHVTYVPAQEKNFTTAPAICHDGKAHFPREGVFVSNGTHWFVTQRNFYEPQIITTDNTFVSGNCDVVIGIVNNTVYDPLQPELDSFKEELDKYFKNHTSPDVDLGDISGINASVVNIQKEIDRLNEVAKNLNESLIDLQELGKYEQYIKWPWLWYIKIFIMIVGGLIGLRIVFAVLSLVNRVRQGYSPLSFQTLTPVPRGPDRPEGTEEGGGEQDRNRSIRLVSGFLALAWDDLRSLCLFSYHRLRDLILIATRIVELLGHRGWEAIKYLWNLLLYWGRELKISAINLIDTIAIVVAGWTDRVIEIGQGIGRAILHIPRRIRQGLERSLL

SEQ ID NO: 107 - protein, 1257 aa, Artificial Sequence
  Chemically Synthesized
MFVFLVLLPLVSSQCVNLTTRTQLPPAYTNSFTRGVYYPDKVFRSSVLHSTQDLFLPFFSNVTWFHAIHVSGTNGTKRFDNPVLPFNDGVYFASTEKSNIIRGWIFGTTLDSKTQSLLIVNNATNVVIKVCEFQFCNDPFLGVYYHKNNKSWMESEFRVYSSANNCTFEYVSQPFLMDLEGKQGNFKNLREFVFKNIDGYFKIYSKHTPINLVRDLPQGFSALEPLVDLPIGINITRFQTLLALHRSYLTPGDSSSGWTAGAAAYYVGYLQPRTFLLKYNENGTITDAVDCALDPLSETKCTLKSFTVEKGIYQTSNFRVQPTESIVRFPNITNLCPFGEVFNATRFASVYAWNRKRISNCVADYSVLYNSASFSTFKCYGVSPTKLNDLCFTNVYADSFVIRGDEVRQIAPGQTGKIADYNYKLPDDFTGCVIAWNSNNLDSKVGGNYNYLYRLFRKSNLKPFERDISTEIYQAGSTPCNGVEGFNCYFPLQSYGFQPTNGVGYQPYRVVVLSFELLHAPATVCGPKKSTNLVKNKCVNFNFNGLTGTGVLTESNKKFLPFQQFGRDIADTTDAVRDPQTLEILDITPCSFGGVSVITPGTNTSNQVAVLYQDVNCTEVPVAIHADQLTPTWRVYSTGSNVFQTRAGCLIGAEHVNNSYECDIPIGAGICASYQTQTNSPRRARSVASQSIIAYTMSLGAENSVAYSNNSIAIPTNFTISVTTEILPVSMTKTSVDCTMYICGDSTECSNLLLQYGSFCTQLNRALTGIAVEQDKNTQEVFAQVKQIYKTPPIKDFGGFNFSQILPDPSKPSKRSFIEDLLFNKVTLADAGFIKQYGDCLGDIAARDLICAQKFNGLTVLPPLLTDEMIAQYTSALLAGTITSGWTFGAGAALQIPFAMQMAYRFNGIGVTQNVLYENQKLIANQFNSAIGKIQDSLSSTASALGKLQDVVNQNAQALNTLVKQLSSNFGAISSVLNDILSRLDKVEAEVQIDRLITGRLQSLQTYVTQQLIRAAEIRASANLAATKMSECVLGQSKRVDFCGKGYHLMSFPQSAPHGVVFLHVTYVPAQEKNFTTAPAICHDGKAHFPREGVFVSNGTHWFVTQRNFYEPQIITTDNTFVSGNCDVVIGIVNNTVYDPLQPELDSFKEELDKYFKNHTSPDVDLGDISGINASVVNIQKEIDRLNEVAKNLNESLIDLQELGKYEQYIKWPFFFIIGLIIGLFLVLRVGIHLCIKLKHTKKRQIYTDIEMNRLGK

SEQ ID NO: 108 - protein, 1255 aa, Artificial Sequence
  Chemically Synthesized
MFIFLLFLTLTSGSDLDRCTTFDDVQAPNYTQHTSSMRGVYYPDEIFRSDTLYLTQDLFLPFYSNVTGFHTINHTFDNPVIPFKDGIYFAATEKSNVVRGWVFGSTMNNKSQSVIIINNSTNVVIRACNFELCDNPFFAVSKPMGTQTHTMIFDNAFNCTFEYISDAFSLDVSEKSGNFKHLREFVFKNKDGFLYVYKGYQPIDVVRDLPSGFNTLKPIFKLPLGINITNFRAILTAFSPAQDTWGTSAAAYFVGYLKPTTFMLKYDENGTITDAVDCSQNPLAELKCSVKSFEIDKGIYQTSNFRVVPSGDVVRFPNITNLCPFGEVFNATKFPSVYAWERKKISNCVADYSVLYNSTFFSTFKCYGVSATKLNDLCFSNVYADSFVVKGDDVRQIAPGQTGVIADYNYKLPDDFMGCVLAWNTRNIDATSTGNYNYKYRYLRHGKLRPFERDISNVPFSPDGKPCTPPALNCYWPLNDYGFYTTTGIGYQPYRVVVLSFELLNAPATVCGPKLSTDLIKNQCVNFNFNGLTGTGVLTPSSKRFQPFQQFGRDVSDFTDSVRDPKTSEILDISPCSFGGVSVITPGTNASSEVAVLYQDVNCTDVSTAIHADQLTPAWRIYSTGNNVFQTQAGCLIGAEHVDTSYECDIPIGAGICASYHTVSLLRSTSQKSIVAYTMSLGADSSIAYSNNTIAIPTNFSISITTEVMPVSMAKTSVDCNMYICGDSTECANLLLQYGSFCTQLNRALSGIAAEQDRNTREVFAQVKQMYKTPTLKYFGGFNFSQILPDPLKPTKRSFIEDLLFNKVTLADAGFMKQYGECLGDINARDLICAQKFNGLTVLPPLLTDDMIAAYTAALVSGTATAGWTFGAGAALQIPFAMQMAYRFNGIGVTQNVLYENQKQIANQFNKAISQIQESLTTTSTALGKLQDVVNQNAQALNTLVKQLSSNFGAISSVLNDILSRLDKVEAEVQIDRLITGRLQSLQTYVTQQLIRAAEIRASANLAATKMSECVLGQSKRVDFCGKGYHLMSFPQAAPHGVVFLHVTYVPSQERNFTTAPAICHEGKAYFPREGVFVFNGTSWFITQRNFFSPQIITTDNTFVSGNCDVVIGIINNTVYDPLQPELDSFKEELDKYFKNHTSPDVDLGDISGINASVVNIQKEIDRLNEVAKNLNESLIDLQELGKYEQYIKWPWYVWLGFIAGLIAIVMVTILLCCMTSCCSCLKGACSCGSCCKFDEDDSEPVLKGVKLHYT

SEQ ID NO: 109 - protein, 1241 aa, Artificial Sequence
  Chemically Synthesized
MPMGSLQPLATLYLLGMLVASVLASGSDLDRCTTFDDVQAPNYTQHTSSMRGVYYPDEIFRSDTLYLTQDLFLPFYSNVTGFHTINHTFDNPVIPFKDGIYFAATEKSNVVRGWVFGSTMNNKSQSVIIINNSTNVVIRACNFELCDNPFFAVSKPMGTQTHTMIFDNAFNCTFEYISDAFSLDVSEKSGNFKHLREFVFKNKDGFLYVYKGYQPIDVVRDLPSGFNTLKPIFKLPLGINITNFRAILTAFSPAQDTWGTSAAAYFVGYLKPTTFMLKYDENGTITDAVDCSQNPLAELKCSVKSFEIDKGIYQTSNFRVVPSGDVVRFPNITNLCPFGEVFNATKFPSVYAWERKKISNCVADYSVLYNSTFFSTFKCYGVSATKLNDLCFSNVYADSFVVKGDDVRQIAPGQTGVIADYNYKLPDDFMGCVLAWNTRNIDATSTGNYNYKYRYLRHGKLRPFERDISNVPFSPDGKPCTPPALNCYWPLNDYGFYTTTGIGYQPYRVVVLSFELLNAPATVCGPKLSTDLIKNQCVNFNFNGLTGTGVLTPSSKRFQPFQQFGRDVSDFTDSVRDPKTSEILDISPCSFGGVSVITPGTNASSEVAVLYQDVNCTDVSTAIHADQLTPAWRIYSTGNNVFQTQAGCLIGAEHVDTSYECDIPIGAGICASYHTVSLLRSTSQKSIVAYTMSLGADSSIAYSNNTIAIPTNFSISITTEVMPVSMAKTSVDCNMYICGDSTECANLLLQYGSFCTQLNRALSGIAAEQDRNTREVFAQVKQMYKTPTLKYFGGFNFSQILPDPLKPTKRSFIEDLLFNKVTLADAGFMKQYGECLGDINARDLICAQKFNGLTVLPPLLTDDMIAAYTAALVSGTATAGWTFGAGAALQIPFAMQMAYRFNGIGVTQNVLYENQKQIANQFNKAISQIQESLTTTSTALGKLQDVVNQNAQALNTLVKQLSSNFGAISSVLNDILSRLDKVEAEVQIDRLITGRLQSLQTYVTQQLIRAAEIRASANLAATKMSECVLGQSKRVDFCGKGYHLMSFPQAAPHGVVFLHVTYVPSQERNFTTAPAICHEGKAYFPREGVFVFNGTSWFITQRNFFSPQIITTDNTFVSGNCDVVIGIINNTVYDPLQPELDSFKEELDKYFKNHTSPDVDLGDISGINASVVNIQKEIDRLNEVAKNLNESLIDLQELGKYEQYIKWPWYVWLGFIAGLIAIVMVTILLCCMTSCCSCLKG

SEQ ID NO: 110 - protein, 1252 aa, Artificial Sequence
  Chemically Synthesized
MPMGSLQPLATLYLLGMLVASVLASGSDLDRCTTFDDVQAPNYTQHTSSMRGVYYPDEIFRSDTLYLTQDLFLPFYSNVTGFHTINHTFDNPVIPFKDGIYFAATEKSNVVRGWVFGSTMNNKSQSVIIINNSTNVVIRACNFELCDNPFFAVSKPMGTQTHTMIFDNAFNCTFEYISDAFSLDVSEKSGNFKHLREFVFKNKDGFLYVYKGYQPIDVVRDLPSGFNTLKPIFKLPLGINITNFRAILTAFSPAQDTWGTSAAAYFVGYLKPTTFMLKYDENGTITDAVDCSQNPLAELKCSVKSFEIDKGIYQTSNFRVVPSGDVVRFPNITNLCPFGEVFNATKFPSVYAWERKKISNCVADYSVLYNSTFFSTFKCYGVSATKLNDLCFSNVYADSFVVKGDDVRQIAPGQTGVIADYNYKLPDDFMGCVLAWNTRNIDATSTGNYNYKYRYLRHGKLRPFERDISNVPFSPDGKPCTPPALNCYWPLNDYGFYTTTGIGYQPYRVVVLSFELLNAPATVCGPKLSTDLIKNQCVNFNFNGLTGTGVLTPSSKRFQPFQQFGRDVSDFTDSVRDPKTSEILDISPCSFGGVSVITPGTNASSEVAVLYQDVNCTDVSTAIHADQLTPAWRIYSTGNNVFQTQAGCLIGAEHVDTSYECDIPIGAGICASYHTVSLLRSTSQKSIVAYTMSLGADSSIAYSNNTIAIPTNFSISITTEVMPVSMAKTSVDCNMYICGDSTECANLLLQYGSFCTQLNRALSGIAAEQDRNTREVFAQVKQMYKTPTLKYFGGFNFSQILPDPLKPTKRSFIEDLLFNKVTLADAGFMKQYGECLGDINARDLICAQKFNGLTVLPPLLTDDMIAAYTAALVSGTATAGWTFGAGAALQIPFAMQMAYRFNGIGVTQNVLYENQKQIANQFNKAISQIQESLTTTSTALGKLQDVVNQNAQALNTLVKQLSSNFGAISSVLNDILSRLDKVEAEVQIDRLITGRLQSLQTYVTQQLIRAAEIRASANLAATKMSECVLGQSKRVDFCGKGYHLMSFPQAAPHGVVFLHVTYVPSQERNFTTAPAICHEGKAYFPREGVFVFNGTSWFITQRNFFSPQIITTDNTFVSGNCDVVIGIINNTVYDPLQPELDSFKEELDKYFKNHTSPDVDLGDISGINASVVNIQKEIDRLNEVAKNLNESLIDLQELGKYEQYIKWPFFFIIGLIIGLFLVLRVGIHLCIKLKHTKKRQIYTDIEMNRLGK

SEQ ID NO: 111 - protein, 1259 aa, Artificial Sequence
  Chemically Synthesized
MPMGSLQPLATLYLLGMLVASVLASSQCVNLTTRTQLPPAYTNSFTRGVYYPDKVFRSSVLHSTQDLFLPFFSNVTWFHAIHVSGTNGTKRFDNPVLPFNDGVYFASTEKSNIIRGWIFGTTLDSKTQSLLIVNNATNVVIKVCEFQFCNDPFLGVYYHKNNKSWMESEFRVYSSANNCTFEYVSQPFLMDLEGKQGNFKNLREFVFKNIDGYFKIYSKHTPINLVRDLPQGFSALEPLVDLPIGINITRFQTLLALHRSYLTPGDSSSGWTAGAAAYYVGYLQPRTFLLKYNENGTITDAVDCALDPLSETKCTLKSFTVEKGIYQTSNFRVQPTESIVRFPNITNLCPFGEVFNATRFASVYAWNRKRISNCVADYSVLYNSASFSTFKCYGVSPTKLNDLCFTNVYADSFVIRGDEVRQIAPGQTGKIADYNYKLPDDFTGCVIAWNSNNLDSKVGGNYNYLYRLFRKSNLKPFERDISTEIYQAGSTPCNGVEGFNCYFPLQSYGFQPTNGVGYQPYRVVVLSFELLHAPATVCGPKKSTNLVKNKCVNFNFNGLTGTGVLTESNKKFLPFQQFGRDIADTTDAVRDPQTLEILDITPCSFGGVSVITPGTNTSNQVAVLYQDVNCTEVPVAIHADQLTPTWRVYSTGSNVFQTRAGCLIGAEHVNNSYECDIPIGAGICASYQTQTNSPRRARSVASQSIIAYTMSLGAENSVAYSNNSIAIPTNFTISVTTEILPVSMTKTSVDCTMYICGDSTECSNLLLQYGSFCTQLNRALTGIAVEQDKNTQEVFAQVKQIYKTPPIKDFGGFNFSQILPDPSKPSKRSFIEDLLFNKVTLADAGFIKQYGDCLGDIAARDLICAQKFNGLTVLPPLLTDEMIAQYTSALLAGTITSGWTFGAGAALQIPFAMQMAYRFNGIGVTQNVLYENQKLIANQFNSAIGKIQDSLSSTASALGKLQDVVNQNAQALNTLVKQLSSNFGAISSVLNDILSRLDKVEAEVQIDRLITGRLQSLQTYVTQQLIRAAEIRASANLAATKMSECVLGQSKRVDFCGKGYHLMSFPQSAPHGVVFLHVTYVPAQEKNFTTAPAICHDGKAHFPREGVFVSNGTHWFVTQRNFYEPQIITTDNTFVSGNCDVVIGIVNNTVYDPLQPELDSFKEELDKYFKNHTSPDVDLGDISGINASVVNIQKEIDRLNEVAKNLNESLIDLQELGKYEQYIKWPWYIWLGFIAGLIAIVMVTIMLCCMTSCCSCLKG

SEQ ID NO: 112 - protein, 1270 aa, Artificial Sequence
  Chemically Synthesized
MPMGSLQPLATLYLLGMLVASVLASSQCVNLTTRTQLPPAYTNSFTRGVYYPDKVFRSSVLHSTQDLFLPFFSNVTWFHAIHVSGTNGTKRFDNPVLPFNDGVYFASTEKSNIIRGWIFGTTLDSKTQSLLIVNNATNVVIKVCEFQFCNDPFLGVYYHKNNKSWMESEFRVYSSANNCTFEYVSQPFLMDLEGKQGNFKNLREFVFKNIDGYFKIYSKHTPINLVRDLPQGFSALEPLVDLPIGINITRFQTLLALHRSYLTPGDSSSGWTAGAAAYYVGYLQPRTFLLKYNENGTITDAVDCALDPLSETKCTLKSFTVEKGIYQTSNFRVQPTESIVRFPNITNLCPFGEVFNATRFASVYAWNRKRISNCVADYSVLYNSASFSTFKCYGVSPTKLNDLCFTNVYADSFVIRGDEVRQIAPGQTGKIADYNYKLPDDFTGCVIAWNSNNLDSKVGGNYNYLYRLFRKSNLKPFERDISTEIYQAGSTPCNGVEGFNCYFPLQSYGFQPTNGVGYQPYRVVVLSFELLHAPATVCGPKKSTNLVKNKCVNFNFNGLTGTGVLTESNKKFLPFQQFGRDIADTTDAVRDPQTLEILDITPCSFGGVSVITPGTNTSNQVAVLYQDVNCTEVPVAIHADQLTPTWRVYSTGSNVFQTRAGCLIGAEHVNNSYECDIPIGAGICASYQTQTNSPRRARSVASQSIIAYTMSLGAENSVAYSNNSIAIPTNFTISVTTEILPVSMTKTSVDCTMYICGDSTECSNLLLQYGSFCTQLNRALTGIAVEQDKNTQEVFAQVKQIYKTPPIKDFGGFNFSQILPDPSKPSKRSFIEDLLFNKVTLADAGFIKQYGDCLGDIAARDLICAQKFNGLTVLPPLLTDEMIAQYTSALLAGTITSGWTFGAGAALQIPFAMQMAYRFNGIGVTQNVLYENQKLIANQFNSAIGKIQDSLSSTASALGKLQDVVNQNAQALNTLVKQLSSNFGAISSVLNDILSRLDKVEAEVQIDRLITGRLQSLQTYVTQQLIRAAEIRASANLAATKMSECVLGQSKRVDFCGKGYHLMSFPQSAPHGVVFLHVTYVPAQEKNFTTAPAICHDGKAHFPREGVFVSNGTHWFVTQRNFYEPQIITTDNTFVSGNCDVVIGIVNNTVYDPLQPELDSFKEELDKYFKNHTSPDVDLGDISGINASVVNIQKEIDRLNEVAKNLNESLIDLQELGKYEQYIKWPFFFIIGLIIGLFLVLRVGIHLCIKLKHTKKRQIYTDIEMNRLGK

SEQ ID NO: 113 - protein, 1273 aa, Artificial Sequence
  Chemically Synthesized
MFVFLVLLPLVSSQCVNLTTRTQLPPAYTNSFTRGVYYPDKVFRSSVLHSTQDLFLPFFSNVTWFHAIHVSGTNGTKRFDNPVLPFNDGVYFASTEKSNIIRGWIFGTTLDSKTQSLLIVNNATNVVIKVCEFQFCNDPFLGVYYHKNNKSWMESEFRVYSSANNCTFEYVSQPFLMDLEGKQGNFKNLREFVFKNIDGYFKIYSKHTPINLVRDLPQGFSALEPLVDLPIGINITRFQTLLALHRSYLTPGDSSSGWTAGAAAYYVGYLQPRTFLLKYNENGTITDAVDCALDPLSETKCTLKSFTVEKGIYQTSNFRVQPTESIVRFPNITNLCPFGEVFNATRFASVYAWNRKRISNCVADYSVLYNSASFSTFKCYGVSPTKLNDLCFTNVYADSFVIRGDEVRQIAPGQTGKIADYNYKLPDDFTGCVIAWNSNNLDSKVGGNYNYLYRLFRKSNLKPFERDISTEIYQAGSTPCNGVEGFNCYFPLQSYGFQPTYGVGYQPYRVVVLSFELLHAPATVCGPKKSTNLVKNKCVNFNFNGLTGTGVLTESNKKFLPFQQFGRDIADTTDAVRDPQTLEILDITPCSFGGVSVITPGTNTSNQVAVLYQDVNCTEVPVAIHADQLTPTWRVYSTGSNVFQTRAGCLIGAEHVNNSYECDIPIGAGICASYQTQTNSPRRARSVASQSIIAYTMSLGAENSVAYSNNSIAIPTNFTISVTTEILPVSMTKTSVDCTMYICGDSTECSNLLLQYGSFCTQLNRALTGIAVEQDKNTQEVFAQVKQIYKTPPIKDFGGFNFSQILPDPSKPSKRSFIEDLLFNKVTLADAGFIKQYGDCLGDIAARDLICAQKFNGLTVLPPLLTDEMIAQYTSALLAGTITSGWTFGAGAALQIPFAMQMAYRFNGIGVTQNVLYENQKLIANQFNSAIGKIQDSLSSTASALGKLQDVVNQNAQALNTLVKQLSSNFGAISSVLNDILSRLDKVEAEVQIDRLITGRLQSLQTYVTQQLIRAAEIRASANLAATKMSECVLGQSKRVDFCGKGYHLMSFPQSAPHGVVFLHVTYVPAQEKNFTTAPAICHDGKAHFPREGVFVSNGTHWFVTQRNFYEPQIITTDNTFVSGNCDVVIGIVNNTVYDPLQPELDSFKEELDKYFKNHTSPDVDLGDISGINASVVNIQKEIDRLNEVAKNLNESLIDLQELGKYEQYIKWPWYIWLGFIAGLIAIVMVTIMLCCMTSCCSCLKGCCSCGSCCKFDEDDSEPVLKGVKLHYT

SEQ ID NO: 114 - protein, 1259 aa, Artificial Sequence
  Chemically Synthesized
MPMGSLQPLATLYLLGMLVASVLASSQCVNLTTRTQLPPAYTNSFTRGVYYPDKVFRSSVLHSTQDLFLPFFSNVTWFHAIHVSGTNGTKRFDNPVLPFNDGVYFASTEKSNIIRGWIFGTTLDSKTQSLLIVNNATNVVIKVCEFQFCNDPFLGVYYHKNNKSWMESEFRVYSSANNCTFEYVSQPFLMDLEGKQGNFKNLREFVFKNIDGYFKIYSKHTPINLVRDLPQGFSALEPLVDLPIGINITRFQTLLALHRSYLTPGDSSSGWTAGAAAYYVGYLQPRTFLLKYNENGTITDAVDCALDPLSETKCTLKSFTVEKGIYQTSNFRVQPTESIVRFPNITNLCPFGEVFNATRFASVYAWNRKRISNCVADYSVLYNSASFSTFKCYGVSPTKLNDLCFTNVYADSFVIRGDEVRQIAPGQTGKIADYNYKLPDDFTGCVIAWNSNNLDSKVGGNYNYLYRLFRKSNLKPFERDISTEIYQAGSTPCNGVEGFNCYFPLQSYGFQPTYGVGYQPYRVVVLSFELLHAPATVCGPKKSTNLVKNKCVNFNFNGLTGTGVLTESNKKFLPFQQFGRDIADTTDAVRDPQTLEILDITPCSFGGVSVITPGTNTSNQVAVLYQDVNCTEVPVAIHADQLTPTWRVYSTGSNVFQTRAGCLIGAEHVNNSYECDIPIGAGICASYQTQTNSPRRARSVASQSIIAYTMSLGAENSVAYSNNSIAIPTNFTISVTTEILPVSMTKTSVDCTMYICGDSTECSNLLLQYGSFCTQLNRALTGIAVEQDKNTQEVFAQVKQIYKTPPIKDFGGFNFSQILPDPSKPSKRSFIEDLLFNKVTLADAGFIKQYGDCLGDIAARDLICAQKFNGLTVLPPLLTDEMIAQYTSALLAGTITSGWTFGAGAALQIPFAMQMAYRFNGIGVTQNVLYENQKLIANQFNSAIGKIQDSLSSTASALGKLQDVVNQNAQALNTLVKQLSSNFGAISSVLNDILSRLDKVEAEVQIDRLITGRLQSLQTYVTQQLIRAAEIRASANLAATKMSECVLGQSKRVDFCGKGYHLMSFPQSAPHGVVFLHVTYVPAQEKNFTTAPAICHDGKAHFPREGVFVSNGTHWFVTQRNFYEPQIITTDNTFVSGNCDVVIGIVNNTVYDPLQPELDSFKEELDKYFKNHTSPDVDLGDISGINASVVNIQKEIDRLNEVAKNLNESLIDLQELGKYEQYIKWPWYIWLGFIAGLIAIVMVTIMLCCMTSCCSCLKG

SEQ ID NO: 115 - protein, 1273 aa, Artificial Sequence
  Chemically Synthesized
MFVFLVLLPLVSSQCVNLTTRTQLPPAYTNSFTRGVYYPDKVFRSSVLHSTQDLFLPFFSNVTWFHAIHVSGTNGTKRFDNPVLPFNDGVYFASTEKSNIIRGWIFGTTLDSKTQSLLIVNNATNVVIKVCEFQFCNDPFLGVYYHKNNKSWMESEFRVYSSANNCTFEYVSQPFLMDLEGKQGNFKNLREFVFKNIDGYFKIYSKHTPINLVRDLPQGFSALEPLVDLPIGINITRFQTLLALHRSYLTPGDSSSGWTAGAAAYYVGYLQPRTFLLKYNENGTITDAVDCALDPLSETKCTLKSFTVEKGIYQTSNFRVQPTESIVRFPNITNLCPFGEVFNATRFASVYAWNRKRISNCVADYSVLYNSASFSTFKCYGVSPTKLNDLCFTNVYADSFVIRGDEVRQIAPGQTGKIADYNYKLPDDFTGCVIAWNSNNLDSKVGGNYNYLYRLFRKSNLKPFERDISTEIYQAGSTPCNGVEGFNCYFPLQSYGFQPTNGVGYQPYRVVVLSFELLHAPATVCGPKKSTNLVKNKCVNFNFNGLTGTGVLTESNKKFLPFQQFGRDIADTTDAVRDPQTLEILDITPCSFGGVSVITPGTNTSNQVAVLYQGVNCTEVPVAIHADQLTPTWRVYSTGSNVFQTRAGCLIGAEHVNNSYECDIPIGAGICASYQTQTNSPRRARSVASQSIIAYTMSLGAENSVAYSNNSIAIPTNFTISVTTEILPVSMTKTSVDCTMYICGDSTECSNLLLQYGSFCTQLNRALTGIAVEQDKNTQEVFAQVKQIYKTPPIKDFGGFNFSQILPDPSKPSKRSFIEDLLFNKVTLADAGFIKQYGDCLGDIAARDLICAQKFNGLTVLPPLLTDEMIAQYTSALLAGTITSGWTFGAGAALQIPFAMQMAYRFNGIGVTQNVLYENQKLIANQFNSAIGKIQDSLSSTASALGKLQDVVNQNAQALNTLVKQLSSNFGAISSVLNDILSRLDKVEAEVQIDRLITGRLQSLQTYVTQQLIRAAEIRASANLAATKMSECVLGQSKRVDFCGKGYHLMSFPQSAPHGVVFLHVTYVPAQEKNFTTAPAICHDGKAHFPREGVFVSNGTHWFVTQRNFYEPQIITTDNTFVSGNCDVVIGIVNNTVYDPLQPELDSFKEELDKYFKNHTSPDVDLGDISGINASVVNIQKEIDRLNEVAKNLNESLIDLQELGKYEQYIKWPWYIWLGFIAGLIAIVMVTIMLCCMTSCCSCLKGCCSCGSCCKFDEDDSEPVLKGVKLHYT

SEQ ID NO: 116 - protein, 1259 aa, Artificial Sequence
  Chemically Synthesized
MPMGSLQPLATLYLLGMLVASVLASSQCVNLTTRTQLPPAYTNSFTRGVYYPDKVFRSSVLHSTQDLFLPFFSNVTWFHAIHVSGTNGTKRFDNPVLPFNDGVYFASTEKSNIIRGWIFGTTLDSKTQSLLIVNNATNVVIKVCEFQFCNDPFLGVYYHKNNKSWMESEFRVYSSANNCTFEYVSQPFLMDLEGKQGNFKNLREFVFKNIDGYFKIYSKHTPINLVRDLPQGFSALEPLVDLPIGINITRFQTLLALHRSYLTPGDSSSGWTAGAAAYYVGYLQPRTFLLKYNENGTITDAVDCALDPLSETKCTLKSFTVEKGIYQTSNFRVQPTESIVRFPNITNLCPFGEVFNATRFASVYAWNRKRISNCVADYSVLYNSASFSTFKCYGVSPTKLNDLCFTNVYADSFVIRGDEVRQIAPGQTGKIADYNYKLPDDFTGCVIAWNSNNLDSKVGGNYNYLYRLFRKSNLKPFERDISTEIYQAGSTPCNGVEGFNCYFPLQSYGFQPTNGVGYQPYRVVVLSFELLHAPATVCGPKKSTNLVKNKCVNFNFNGLTGTGVLTESNKKFLPFQQFGRDIADTTDAVRDPQTLEILDITPCSFGGVSVITPGTNTSNQVAVLYQGVNCTEVPVAIHADQLTPTWRVYSTGSNVFQTRAGCLIGAEHVNNSYECDIPIGAGICASYQTQTNSPRRARSVASQSIIAYTMSLGAENSVAYSNNSIAIPTNFTISVTTEILPVSMTKTSVDCTMYICGDSTECSNLLLQYGSFCTQLNRALTGIAVEQDKNTQEVFAQVKQIYKTPPIKDFGGFNFSQILPDPSKPSKRSFIEDLLFNKVTLADAGFIKQYGDCLGDIAARDLICAQKFNGLTVLPPLLTDEMIAQYTSALLAGTITSGWTFGAGAALQIPFAMQMAYRFNGIGVTQNVLYENQKLIANQFNSAIGKIQDSLSSTASALGKLQDVVNQNAQALNTLVKQLSSNFGAISSVLNDILSRLDKVEAEVQIDRLITGRLQSLQTYVTQQLIRAAEIRASANLAATKMSECVLGQSKRVDFCGKGYHLMSFPQSAPHGVVFLHVTYVPAQEKNFTTAPAICHDGKAHFPREGVFVSNGTHWFVTQRNFYEPQIITTDNTFVSGNCDVVIGIVNNTVYDPLQPELDSFKEELDKYFKNHTSPDVDLGDISGINASVVNIQKEIDRLNEVAKNLNESLIDLQELGKYEQYIKWPWYIWLGFIAGLIAIVMVTIMLCCMTSCCSCLKG

SEQ ID NO: 117 - protein, 1273 aa, Artificial Sequence
  Chemically Synthesized
MFVFLVLLPLVSSQCVNLTTRTQLPPAYTNSFTRGVYYPDKVFRSSVLHSTQDLFLPFFSNVTWFHAIHVSGTNGTKRFDNPVLPFNDGVYFASTEKSNIIRGWIFGTTLDSKTQSLLIVNNATNVVIKVCEFQFCNDPFLGVYYHKNNKSWMESEFRVYSSANNCTFEYVSQPFLMDLEGKQGNFKNLREFVFKNIDGYFKIYSKHTPINLVRDLPQGFSALEPLVDLPIGINITRFQTLLALHRSYLTPGDSSSGWTAGAAAYYVGYLQPRTFLLKYNENGTITDAVDCALDPLSETKCTLKSFTVEKGIYQTSNFRVQPTESIVRFPNITNLCPFGEVFNATRFASVYAWNRKRISNCVADYSVLYNSASFSTFKCYGVSPTKLNDLCFTNVYADSFVIRGDEVRQIAPGQTGKIADYNYKLPDDFTGCVIAWNSNNLDSKVGGNYNYRYRLFRKSNLKPFERDISTEIYQAGSTPCNGVEGFNCYFPLQSYGFQPTNGVGYQPYRVVVLSFELLHAPATVCGPKKSTNLVKNKCVNFNFNGLTGTGVLTESNKKFLPFQQFGRDIADTTDAVRDPQTLEILDITPCSFGGVSVITPGTNTSNQVAVLYQDVNCTEVPVAIHADQLTPTWRVYSTGSNVFQTRAGCLIGAEHVNNSYECDIPIGAGICASYQTQTNSPRRARSVASQSIIAYTMSLGAENSVAYSNNSIAIPTNFTISVTTEILPVSMTKTSVDCTMYICGDSTECSNLLLQYGSFCTQLNRALTGIAVEQDKNTQEVFAQVKQIYKTPPIKDFGGFNFSQILPDPSKPSKRSFIEDLLFNKVTLADAGFIKQYGDCLGDIAARDLICAQKFNGLTVLPPLLTDEMIAQYTSALLAGTITSGWTFGAGAALQIPFAMQMAYRFNGIGVTQNVLYENQKLIANQFNSAIGKIQDSLSSTASALGKLQDVVNQNAQALNTLVKQLSSNFGAISSVLNDILSRLDKVEAEVQIDRLITGRLQSLQTYVTQQLIRAAEIRASANLAATKMSECVLGQSKRVDFCGKGYHLMSFPQSAPHGVVFLHVTYVPAQEKNFTTAPAICHDGKAHFPREGVFVSNGTHWFVTQRNFYEPQIITTDNTFVSGNCDVVIGIVNNTVYDPLQPELDSFKEELDKYFKNHTSPDVDLGDISGINASVVNIQKEIDRLNEVAKNLNESLIDLQELGKYEQYIKWPWYIWLGFIAGLIAIVMVTIMLCCMTSCCSCLKGCCSCGSCCKFDEDDSEPVLKGVKLHYT

SEQ ID NO: 118 - protein, 1259 aa, Artificial Sequence
  Chemically Synthesized
MPMGSLQPLATLYLLGMLVASVLASSQCVNLTTRTQLPPAYTNSFTRGVYYPDKVFRSSVLHSTQDLFLPFFSNVTWFHAIHVSGTNGTKRFDNPVLPFNDGVYFASTEKSNIIRGWIFGTTLDSKTQSLLIVNNATNVVIKVCEFQFCNDPFLGVYYHKNNKSWMESEFRVYSSANNCTFEYVSQPFLMDLEGKQGNFKNLREFVFKNIDGYFKIYSKHTPINLVRDLPQGFSALEPLVDLPIGINITRFQTLLALHRSYLTPGDSSSGWTAGAAAYYVGYLQPRTFLLKYNENGTITDAVDCALDPLSETKCTLKSFTVEKGIYQTSNFRVQPTESIVRFPNITNLCPFGEVFNATRFASVYAWNRKRISNCVADYSVLYNSASFSTFKCYGVSPTKLNDLCFTNVYADSFVIRGDEVRQIAPGQTGKIADYNYKLPDDFTGCVIAWNSNNLDSKVGGNYNYRYRLFRKSNLKPFERDISTEIYQAGSTPCNGVEGFNCYFPLQSYGFQPTNGVGYQPYRVVVLSFELLHAPATVCGPKKSTNLVKNKCVNFNFNGLTGTGVLTESNKKFLPFQQFGRDIADTTDAVRDPQTLEILDITPCSFGGVSVITPGTNTSNQVAVLYQDVNCTEVPVAIHADQLTPTWRVYSTGSNVFQTRAGCLIGAEHVNNSYECDIPIGAGICASYQTQTNSPRRARSVASQSIIAYTMSLGAENSVAYSNNSIAIPTNFTISVTTEILPVSMTKTSVDCTMYICGDSTECSNLLLQYGSFCTQLNRALTGIAVEQDKNTQEVFAQVKQIYKTPPIKDFGGFNFSQILPDPSKPSKRSFIEDLLFNKVTLADAGFIKQYGDCLGDIAARDLICAQKFNGLTVLPPLLTDEMIAQYTSALLAGTITSGWTFGAGAALQIPFAMQMAYRFNGIGVTQNVLYENQKLIANQFNSAIGKIQDSLSSTASALGKLQDVVNQNAQALNTLVKQLSSNFGAISSVLNDILSRLDKVEAEVQIDRLITGRLQSLQTYVTQQLIRAAEIRASANLAATKMSECVLGQSKRVDFCGKGYHLMSFPQSAPHGVVFLHVTYVPAQEKNFTTAPAICHDGKAHFPREGVFVSNGTHWFVTQRNFYEPQIITTDNTFVSGNCDVVIGIVNNTVYDPLQPELDSFKEELDKYFKNHTSPDVDLGDISGINASVVNIQKEIDRLNEVAKNLNESLIDLQELGKYEQYIKWPWYIWLGFIAGLIAIVMVTIMLCCMTSCCSCLKG

SEQ ID NO: 119 - protein, 1273 aa, Artificial Sequence
  Chemically Synthesized
MFVFLVLLPLVSSQCVNLTTRTQLPPAYTNSFTRGVYYPDKVFRSSVLHSTQDLFLPFFSNVTWFHAIHVSGTNGTKRFDNPVLPFNDGVYFASTEKSNIIRGWIFGTTLDSKTQSLLIVNNATNVVIKVCEFQFCNDPFLGVYYHKNNKSWMESEFRVYSSANNCTFEYVSQPFLMDLEGKQGNFKNLREFVFKNIDGYFKIYSKHTPINLVRDLPQGFSALEPLVDLPIGINITRFQTLLALHRSYLTPGDSSSGWTAGAAAYYVGYLQPRTFLLKYNENGTITDAVDCALDPLSETKCTLKSFTVEKGIYQTSNFRVQPTESIVRFPNITNLCPFGEVFNATRFASVYAWNRKRISNCVADYSVLYNSASFSTFKCYGVSPTKLNDLCFTNVYADSFVIRGDEVRQIAPGQTGKIADYNYKLPDDFTGCVIAWNSNNLDSKVGGNYNYLYRLFRKSNLKPFERDISTEIYQAGSTPCNGVKGFNCYFPLQSYGFQPTNGVGYQPYRVVVLSFELLHAPATVCGPKKSTNLVKNKCVNFNFNGLTGTGVLTESNKKFLPFQQFGRDIADTTDAVRDPQTLEILDITPCSFGGVSVITPGTNTSNQVAVLYQDVNCTEVPVAIHADQLTPTWRVYSTGSNVFQTRAGCLIGAEHVNNSYECDIPIGAGICASYQTQTNSPRRARSVASQSIIAYTMSLGAENSVAYSNNSIAIPTNFTISVTTEILPVSMTKTSVDCTMYICGDSTECSNLLLQYGSFCTQLNRALTGIAVEQDKNTQEVFAQVKQIYKTPPIKDFGGFNFSQILPDPSKPSKRSFIEDLLFNKVTLADAGFIKQYGDCLGDIAARDLICAQKFNGLTVLPPLLTDEMIAQYTSALLAGTITSGWTFGAGAALQIPFAMQMAYRFNGIGVTQNVLYENQKLIANQFNSAIGKIQDSLSSTASALGKLQDVVNQNAQALNTLVKQLSSNFGAISSVLNDILSRLDKVEAEVQIDRLITGRLQSLQTYVTQQLIRAAEIRASANLAATKMSECVLGQSKRVDFCGKGYHLMSFPQSAPHGVVFLHVTYVPAQEKNFTTAPAICHDGKAHFPREGVFVSNGTHWFVTQRNFYEPQIITTDNTFVSGNCDVVIGIVNNTVYDPLQPELDSFKEELDKYFKNHTSPDVDLGDISGINASVVNIQKEIDRLNEVAKNLNESLIDLQELGKYEQYIKWPWYIWLGFIAGLIAIVMVTIMLCCMTSCCSCLKGCCSCGSCCKFDEDDSEPVLKGVKLHYT

SEQ ID NO: 120 - protein, 1259 aa, Artificial Sequence
  Chemically Synthesized
MPMGSLQPLATLYLLGMLVASVLASSQCVNLTTRTQLPPAYTNSFTRGVYYPDKVFRSSVLHSTQDLFLPFFSNVTWFHAIHVSGTNGTKRFDNPVLPFNDGVYFASTEKSNIIRGWIFGTTLDSKTQSLLIVNNATNVVIKVCEFQFCNDPFLGVYYHKNNKSWMESEFRVYSSANNCTFEYVSQPFLMDLEGKQGNFKNLREFVFKNIDGYFKIYSKHTPINLVRDLPQGFSALEPLVDLPIGINITRFQTLLALHRSYLTPGDSSSGWTAGAAAYYVGYLQPRTFLLKYNENGTITDAVDCALDPLSETKCTLKSFTVEKGIYQTSNFRVQPTESIVRFPNITNLCPFGEVFNATRFASVYAWNRKRISNCVADYSVLYNSASFSTFKCYGVSPTKLNDLCFTNVYADSFVIRGDEVRQIAPGQTGKIADYNYKLPDDFTGCVIAWNSNNLDSKVGGNYNYLYRLFRKSNLKPFERDISTEIYQAGSTPCNGVKGFNCYFPLQSYGFQPTNGVGYQPYRVVVLSFELLHAPATVCGPKKSTNLVKNKCVNFNFNGLTGTGVLTESNKKFLPFQQFGRDIADTTDAVRDPQTLEILDITPCSFGGVSVITPGTNTSNQVAVLYQDVNCTEVPVAIHADQLTPTWRVYSTGSNVFQTRAGCLIGAEHVNNSYECDIPIGAGICASYQTQTNSPRRARSVASQSIIAYTMSLGAENSVAYSNNSIAIPTNFTISVTTEILPVSMTKTSVDCTMYICGDSTECSNLLLQYGSFCTQLNRALTGIAVEQDKNTQEVFAQVKQIYKTPPIKDFGGFNFSQILPDPSKPSKRSFIEDLLFNKVTLADAGFIKQYGDCLGDIAARDLICAQKFNGLTVLPPLLTDEMIAQYTSALLAGTITSGWTFGAGAALQIPFAMQMAYRFNGIGVTQNVLYENQKLIANQFNSAIGKIQDSLSSTASALGKLQDVVNQNAQALNTLVKQLSSNFGAISSVLNDILSRLDKVEAEVQIDRLITGRLQSLQTYVTQQLIRAAEIRASANLAATKMSECVLGQSKRVDFCGKGYHLMSFPQSAPHGVVFLHVTYVPAQEKNFTTAPAICHDGKAHFPREGVFVSNGTHWFVTQRNFYEPQIITTDNTFVSGNCDVVIGIVNNTVYDPLQPELDSFKEELDKYFKNHTSPDVDLGDISGINASVVNIQKEIDRLNEVAKNLNESLIDLQELGKYEQYIKWPWYIWLGFIAGLIAIVMVTIMLCCMTSCCSCLKG

SEQ ID NO: 121 - protein, 1273 aa, Artificial Sequence
  Chemically Synthesized
MFVFLVLLPLVSSQCVNLTTRTQLPPAYTNSFTRGVYYPDKVFRSSVLHSTQDLFLPFFSNVTWFHAIHVSGTNGTKRFDNPVLPFNDGVYFASTEKSNIIRGWIFGTTLDSKTQSLLIVNNATNVVIKVCEFQFCNDPFLGVYYHKNNKSWMESEFRVYSSANNCTFEYVSQPFLMDLEGKQGNFKNLREFVFKNIDGYFKIYSKHTPINLVRDLPQGFSALEPLVDLPIGINITRFQTLLALHRSYLTPGDSSSGWTAGAAAYYVGYLQPRTFLLKYNENGTITDAVDCALDPLSETKCTLKSFTVEKGIYQTSNFRVQPTESIVRFPNITNLCPFGEVFNATRFASVYAWNRKRISNCVADYSVLYNSASFSTFKCYGVSPTKLNDLCFTNVYADSFVIRGDEVRQIAPGQTGKIADYNYKLPDDFTGCVIAWNSNNLDSKVGGNYNYLYRLFRKSNLKPFERDISTEIYQAGSTPCNGVKGFNCYFPLQSYGFQPTYGVGYQPYRVVVLSFELLHAPATVCGPKKSTNLVKNKCVNFNFNGLTGTGVLTESNKKFLPFQQFGRDIADTTDAVRDPQTLEILDITPCSFGGVSVITPGTNTSNQVAVLYQDVNCTEVPVAIHADQLTPTWRVYSTGSNVFQTRAGCLIGAEHVNNSYECDIPIGAGICASYQTQTNSPRRARSVASQSIIAYTMSLGAENSVAYSNNSIAIPTNFTISVTTEILPVSMTKTSVDCTMYICGDSTECSNLLLQYGSFCTQLNRALTGIAVEQDKNTQEVFAQVKQIYKTPPIKDFGGFNFSQILPDPSKPSKRSFIEDLLFNKVTLADAGFIKQYGDCLGDIAARDLICAQKFNGLTVLPPLLTDEMIAQYTSALLAGTITSGWTFGAGAALQIPFAMQMAYRFNGIGVTQNVLYENQKLIANQFNSAIGKIQDSLSSTASALGKLQDVVNQNAQALNTLVKQLSSNFGAISSVLNDILSRLDKVEAEVQIDRLITGRLQSLQTYVTQQLIRAAEIRASANLAATKMSECVLGQSKRVDFCGKGYHLMSFPQSAPHGVVFLHVTYVPAQEKNFTTAPAICHDGKAHFPREGVFVSNGTHWFVTQRNFYEPQIITTDNTFVSGNCDVVIGIVNNTVYDPLQPELDSFKEELDKYFKNHTSPDVDLGDISGINASVVNIQKEIDRLNEVAKNLNESLIDLQELGKYEQYIKWPWYIWLGFIAGLIAIVMVTIMLCCMTSCCSCLKGCCSCGSCCKFDEDDSEPVLKGVKLHYT

SEQ ID NO: 122 - protein, 1259 aa, Artificial Sequence
  Chemically Synthesized
MPMGSLQPLATLYLLGMLVASVLASSQCVNLTTRTQLPPAYTNSFTRGVYYPDKVFRSSVLHSTQDLFLPFFSNVTWFHAIHVSGTNGTKRFDNPVLPFNDGVYFASTEKSNIIRGWIFGTTLDSKTQSLLIVNNATNVVIKVCEFQFCNDPFLGVYYHKNNKSWMESEFRVYSSANNCTFEYVSQPFLMDLEGKQGNFKNLREFVFKNIDGYFKIYSKHTPINLVRDLPQGFSALEPLVDLPIGINITRFQTLLALHRSYLTPGDSSSGWTAGAAAYYVGYLQPRTFLLKYNENGTITDAVDCALDPLSETKCTLKSFTVEKGIYQTSNFRVQPTESIVRFPNITNLCPFGEVFNATRFASVYAWNRKRISNCVADYSVLYNSASFSTFKCYGVSPTKLNDLCFTNVYADSFVIRGDEVRQIAPGQTGKIADYNYKLPDDFTGCVIAWNSNNLDSKVGGNYNYLYRLFRKSNLKPFERDISTEIYQAGSTPCNGVKGFNCYFPLQSYGFQPTYGVGYQPYRVVVLSFELLHAPATVCGPKKSTNLVKNKCVNFNFNGLTGTGVLTESNKKFLPFQQFGRDIADTTDAVRDPQTLEILDITPCSFGGVSVITPGTNTSNQVAVLYQDVNCTEVPVAIHADQLTPTWRVYSTGSNVFQTRAGCLIGAEHVNNSYECDIPIGAGICASYQTQTNSPRRARSVASQSIIAYTMSLGAENSVAYSNNSIAIPTNFTISVTTEILPVSMTKTSVDCTMYICGDSTECSNLLLQYGSFCTQLNRALTGIAVEQDKNTQEVFAQVKQIYKTPPIKDFGGFNFSQILPDPSKPSKRSFIEDLLFNKVTLADAGFIKQYGDCLGDIAARDLICAQKFNGLTVLPPLLTDEMIAQYTSALLAGTITSGWTFGAGAALQIPFAMQMAYRFNGIGVTQNVLYENQKLIANQFNSAIGKIQDSLSSTASALGKLQDVVNQNAQALNTLVKQLSSNFGAISSVLNDILSRLDKVEAEVQIDRLITGRLQSLQTYVTQQLIRAAEIRASANLAATKMSECVLGQSKRVDFCGKGYHLMSFPQSAPHGVVFLHVTYVPAQEKNFTTAPAICHDGKAHFPREGVFVSNGTHWFVTQRNFYEPQIITTDNTFVSGNCDVVIGIVNNTVYDPLQPELDSFKEELDKYFKNHTSPDVDLGDISGINASVVNIQKEIDRLNEVAKNLNESLIDLQELGKYEQYIKWPWYIWLGFIAGLIAIVMVTIMLCCMTSCCSCLKG

SEQ ID NO: 123 - protein, 1273 aa, Artificial Sequence
  Chemically Synthesized
MFVFLVLLPLVSSQCVNLTTRTQLPPAYTNSFTRGVYYPDKVFRSSVLHSTQDLFLPFFSNVTWFHAIHVSGTNGTKRFDNPVLPFNDGVYFASTEKSNIIRGWIFGTTLDSKTQSLLIVNNATNVVIKVCEFQFCNDPFLGVYYHKNNKSWMESEFRVYSSANNCTFEYVSQPFLMDLEGKQGNFKNLREFVFKNIDGYFKIYSKHTPINLVRDLPQGFSALEPLVDLPIGINITRFQTLLALHRSYLTPGDSSSGWTAGAAAYYVGYLQPRTFLLKYNENGTITDAVDCALDPLSETKCTLKSFTVEKGIYQTSNFRVQPTESIVRFPNITNLCPFGEVFNATRFASVYAWNRKRISNCVADYSVLYNSASFSTFKCYGVSPTKLNDLCFTNVYADSFVIRGDEVRQIAPGQTGNIADYNYKLPDDFTGCVIAWNSNNLDSKVGGNYNYLYRLFRKSNLKPFERDISTEIYQAGSTPCNGVKGFNCYFPLQSYGFQPTYGVGYQPYRVVVLSFELLHAPATVCGPKKSTNLVKNKCVNFNFNGLTGTGVLTESNKKFLPFQQFGRDIADTTDAVRDPQTLEILDITPCSFGGVSVITPGTNTSNQVAVLYQDVNCTEVPVAIHADQLTPTWRVYSTGSNVFQTRAGCLIGAEHVNNSYECDIPIGAGICASYQTQTNSPRRARSVASQSIIAYTMSLGAENSVAYSNNSIAIPTNFTISVTTEILPVSMTKTSVDCTMYICGDSTECSNLLLQYGSFCTQLNRALTGIAVEQDKNTQEVFAQVKQIYKTPPIKDFGGFNFSQILPDPSKPSKRSFIEDLLFNKVTLADAGFIKQYGDCLGDIAARDLICAQKFNGLTVLPPLLTDEMIAQYTSALLAGTITSGWTFGAGAALQIPFAMQMAYRFNGIGVTQNVLYENQKLIANQFNSAIGKIQDSLSSTASALGKLQDVVNQNAQALNTLVKQLSSNFGAISSVLNDILSRLDKVEAEVQIDRLITGRLQSLQTYVTQQLIRAAEIRASANLAATKMSECVLGQSKRVDFCGKGYHLMSFPQSAPHGVVFLHVTYVPAQEKNFTTAPAICHDGKAHFPREGVFVSNGTHWFVTQRNFYEPQIITTDNTFVSGNCDVVIGIVNNTVYDPLQPELDSFKEELDKYFKNHTSPDVDLGDISGINASVVNIQKEIDRLNEVAKNLNESLIDLQELGKYEQYIKWPWYIWLGFIAGLIAIVMVTIMLCCMTSCCSCLKGCCSCGSCCKFDEDDSEPVLKGVKLHYT

SEQ ID NO: 124 - protein, 1259 aa, Artificial Sequence
  Chemically Synthesized
MPMGSLQPLATLYLLGMLVASVLASSQCVNLTTRTQLPPAYTNSFTRGVYYPDKVFRSSVLHSTQDLFLPFFSNVTWFHAIHVSGTNGTKRFDNPVLPFNDGVYFASTEKSNIIRGWIFGTTLDSKTQSLLIVNNATNVVIKVCEFQFCNDPFLGVYYHKNNKSWMESEFRVYSSANNCTFEYVSQPFLMDLEGKQGNFKNLREFVFKNIDGYFKIYSKHTPINLVRDLPQGFSALEPLVDLPIGINITRFQTLLALHRSYLTPGDSSSGWTAGAAAYYVGYLQPRTFLLKYNENGTITDAVDCALDPLSETKCTLKSFTVEKGIYQTSNFRVQPTESIVRFPNITNLCPFGEVFNATRFASVYAWNRKRISNCVADYSVLYNSASFSTFKCYGVSPTKLNDLCFTNVYADSFVIRGDEVRQIAPGQTGNIADYNYKLPDDFTGCVIAWNSNNLDSKVGGNYNYLYRLFRKSNLKPFERDISTEIYQAGSTPCNGVKGFNCYFPLQSYGFQPTYGVGYQPYRVVVLSFELLHAPATVCGPKKSTNLVKNKCVNFNFNGLTGTGVLTESNKKFLPFQQFGRDIADTTDAVRDPQTLEILDITPCSFGGVSVITPGTNTSNQVAVLYQDVNCTEVPVAIHADQLTPTWRVYSTGSNVFQTRAGCLIGAEHVNNSYECDIPIGAGICASYQTQTNSPRRARSVASQSIIAYTMSLGAENSVAYSNNSIAIPTNFTISVTTEILPVSMTKTSVDCTMYICGDSTECSNLLLQYGSFCTQLNRALTGIAVEQDKNTQEVFAQVKQIYKTPPIKDFGGFNFSQILPDPSKPSKRSFIEDLLFNKVTLADAGFIKQYGDCLGDIAARDLICAQKFNGLTVLPPLLTDEMIAQYTSALLAGTITSGWTFGAGAALQIPFAMQMAYRFNGIGVTQNVLYENQKLIANQFNSAIGKIQDSLSSTASALGKLQDVVNQNAQALNTLVKQLSSNFGAISSVLNDILSRLDKVEAEVQIDRLITGRLQSLQTYVTQQLIRAAEIRASANLAATKMSECVLGQSKRVDFCGKGYHLMSFPQSAPHGVVFLHVTYVPAQEKNFTTAPAICHDGKAHFPREGVFVSNGTHWFVTQRNFYEPQIITTDNTFVSGNCDVVIGIVNNTVYDPLQPELDSFKEELDKYFKNHTSPDVDLGDISGINASVVNIQKEIDRLNEVAKNLNESLIDLQELGKYEQYIKWPWYIWLGFIAGLIAIVMVTIMLCCMTSCCSCLKG

SEQ ID NO: 125 - protein, 1273 aa, Artificial Sequence
  Chemically Synthesized
MFVFLVLLPLVSSQCVNLTTRTQLPPAYTNSFTRGVYYPDKVFRSSVLHSTQDLFLPFFSNVTWFHAIHVSGTNGTKRFDNPVLPFNDGVYFASTEKSNIIRGWIFGTTLDSKTQSLLIVNNATNVVIKVCEFQFCNDPFLGVYYHKNNKSWMESEFRVYSSANNCTFEYVSQPFLMDLEGKQGNFKNLREFVFKNIDGYFKIYSKHTPINLVRDLPQGFSALEPLVDLPIGINITRFQTLLALHRSYLTPGDSSSGWTAGAAAYYVGYLQPRTFLLKYNENGTITDAVDCALDPLSETKCTLKSFTVEKGIYQTSNFRVQPTESIVRFPNITNLCPFGEVFNATRFASVYAWNRKRISNCVADYSVLYNSASFSTFKCYGVSPTKLNDLCFTNVYADSFVIRGDEVRQIAPGQTGNIADYNYKLPDDFTGCVIAWNSNNLDSKVGGNYNYLYRLFRKSNLKPFERDISTEIYQAGSTPCNGVKGFNCYFPLQSYGFQPTYGVGYQPYRVVVLSFELLHAPATVCGPKKSTNLVKNKCVNFNFNGLTGTGVLTESNKKFLPFQQFGRDIADTTDAVRDPQTLEILDITPCSFGGVSVITPGTNTSNQVAVLYQGVNCTEVPVAIHADQLTPTWRVYSTGSNVFQTRAGCLIGAEHVNNSYECDIPIGAGICASYQTQTNSPRRARSVASQSIIAYTMSLGAENSVAYSNNSIAIPTNFTISVTTEILPVSMTKTSVDCTMYICGDSTECSNLLLQYGSFCTQLNRALTGIAVEQDKNTQEVFAQVKQIYKTPPIKDFGGFNFSQILPDPSKPSKRSFIEDLLFNKVTLADAGFIKQYGDCLGDIAARDLICAQKFNGLTVLPPLLTDEMIAQYTSALLAGTITSGWTFGAGAALQIPFAMQMAYRFNGIGVTQNVLYENQKLIANQFNSAIGKIQDSLSSTASALGKLQDVVNQNAQALNTLVKQLSSNFGAISSVLNDILSRLDKVEAEVQIDRLITGRLQSLQTYVTQQLIRAAEIRASANLAATKMSECVLGQSKRVDFCGKGYHLMSFPQSAPHGVVFLHVTYVPAQEKNFTTAPAICHDGKAHFPREGVFVSNGTHWFVTQRNFYEPQIITTDNTFVSGNCDVVIGIVNNTVYDPLQPELDSFKEELDKYFKNHTSPDVDLGDISGINASVVNIQKEIDRLNEVAKNLNESLIDLQELGKYEQYIKWPWYIWLGFIAGLIAIVMVTIMLCCMTSCCSCLKGCCSCGSCCKFDEDDSEPVLKGVKLHYT

SEQ ID NO: 126 - protein, 1259 aa, Artificial Sequence
  Chemically Synthesized
MPMGSLQPLATLYLLGMLVASVLASSQCVNLTTRTQLPPAYTNSFTRGVYYPDKVFRSSVLHSTQDLFLPFFSNVTWFHAIHVSGTNGTKRFDNPVLPFNDGVYFASTEKSNIIRGWIFGTTLDSKTQSLLIVNNATNVVIKVCEFQFCNDPFLGVYYHKNNKSWMESEFRVYSSANNCTFEYVSQPFLMDLEGKQGNFKNLREFVFKNIDGYFKIYSKHTPINLVRDLPQGFSALEPLVDLPIGINITRFQTLLALHRSYLTPGDSSSGWTAGAAAYYVGYLQPRTFLLKYNENGTITDAVDCALDPLSETKCTLKSFTVEKGIYQTSNFRVQPTESIVRFPNITNLCPFGEVFNATRFASVYAWNRKRISNCVADYSVLYNSASFSTFKCYGVSPTKLNDLCFTNVYADSFVIRGDEVRQIAPGQTGNIADYNYKLPDDFTGCVIAWNSNNLDSKVGGNYNYLYRLFRKSNLKPFERDISTEIYQAGSTPCNGVKGFNCYFPLQSYGFQPTYGVGYQPYRVVVLSFELLHAPATVCGPKKSTNLVKNKCVNFNFNGLTGTGVLTESNKKFLPFQQFGRDIADTTDAVRDPQTLEILDITPCSFGGVSVITPGTNTSNQVAVLYQGVNCTEVPVAIHADQLTPTWRVYSTGSNVFQTRAGCLIGAEHVNNSYECDIPIGAGICASYQTQTNSPRRARSVASQSIIAYTMSLGAENSVAYSNNSIAIPTNFTISVTTEILPVSMTKTSVDCTMYICGDSTECSNLLLQYGSFCTQLNRALTGIAVEQDKNTQEVFAQVKQIYKTPPIKDFGGFNFSQILPDPSKPSKRSFIEDLLFNKVTLADAGFIKQYGDCLGDIAARDLICAQKFNGLTVLPPLLTDEMIAQYTSALLAGTITSGWTFGAGAALQIPFAMQMAYRFNGIGVTQNVLYENQKLIANQFNSAIGKIQDSLSSTASALGKLQDVVNQNAQALNTLVKQLSSNFGAISSVLNDILSRLDKVEAEVQIDRLITGRLQSLQTYVTQQLIRAAEIRASANLAATKMSECVLGQSKRVDFCGKGYHLMSFPQSAPHGVVFLHVTYVPAQEKNFTTAPAICHDGKAHFPREGVFVSNGTHWFVTQRNFYEPQIITTDNTFVSGNCDVVIGIVNNTVYDPLQPELDSFKEELDKYFKNHTSPDVDLGDISGINASVVNIQKEIDRLNEVAKNLNESLIDLQELGKYEQYIKWPWYIWLGFIAGLIAIVMVTIMLCCMTSCCSCLKG

SEQ ID NO: 127 - protein, 1292 aa, Artificial Sequence
  Chemically Synthesized
MPMGSLQPLATLYLLGMLVASVLASSQCVNLTTRTQLPPAYTNSFTRGVYYPDKVFRSSVLHSTQDLFLPFFSNVTWFHAIHVSGTNGTKRFDNPVLPFNDGVYFASTEKSNIIRGWIFGTTLDSKTQSLLIVNNATNVVIKVCEFQFCNDPFLGVYYHKNNKSWMESEFRVYSSANNCTFEYVSQPFLMDLEGKQGNFKNLREFVFKNIDGYFKIYSKHTPINLVRDLPQGFSALEPLVDLPIGINITRFQTLLALHRSYLTPGDSSSGWTAGAAAYYVGYLQPRTFLLKYNENGTITDAVDCALDPLSETKCTLKSFTVEKGIYQTSNFRVQPTESIVRFPNITNLCPFGEVFNATRFASVYAWNRKRISNCVADYSVLYNSASFSTFKCYGVSPTKLNDLCFTNVYADSFVIRGDEVRQIAPGQTGKIADYNYKLPDDFTGCVIAWNSNNLDSKVGGNYNYLYRLFRKSNLKPFERDISTEIYQAGSTPCNGVEGFNCYFPLQSYGFQPTNGVGYQPYRVVVLSFELLHAPATVCGPKKSTNLVKNKCVNFNFNGLTGTGVLTESNKKFLPFQQFGRDIADTTDAVRDPQTLEILDITPCSFGGVSVITPGTNTSNQVAVLYQDVNCTEVPVAIHADQLTPTWRVYSTGSNVFQTRAGCLIGAEHVNNSYECDIPIGAGICASYQTQTNSPRRARSVASQSIIAYTMSLGAENSVAYSNNSIAIPTNFTISVTTEILPVSMTKTSVDCTMYICGDSTECSNLLLQYGSFCTQLNRALTGIAVEQDKNTQEVFAQVKQIYKTPPIKDFGGFNFSQILPDPSKPSKRSFIEDLLFNKVTLADAGFIKQYGDCLGDIAARDLICAQKFNGLTVLPPLLTDEMIAQYTSALLAGTITSGWTFGAGAALQIPFAMQMAYRFNGIGVTQNVLYENQKLIANQFNSAIGKIQDSLSSTASALGKLQDVVNQNAQALNTLVKQLSSNFGAISSVLNDILSRLDKVEAEVQIDRLITGRLQSLQTYVTQQLIRAAEIRASANLAATKMSECVLGQSKRVDFCGKGYHLMSFPQSAPHGVVFLHVTYVPAQEKNFTTAPAICHDGKAHFPREGVFVSNGTHWFVTQRNFYEPQIITTDNTFVSGNCDVVIGIVNNTVYDPLQPELDSFKEELDKYFKNHTSPDVDLGDISGINASVVNIQKEIDRLNEVAKNLNESLIDLQELGKYEQYIKWPWYIWLGFIAGLIAIVMVTIMLCCMTSCCSCLKGRMKQLEDKVEELLSKNYHLENEVARLKKLVGER

SEQ ID NO: 128 - protein, 1372 aa, Artificial Sequence
  Chemically Synthesized
MPMGSLQPLATLYLLGMLVASVLASSQCVNLTTRTQLPPAYTNSFTRGVYYPDKVFRSSVLHSTQDLFLPFFSNVTWFHAIHVSGTNGTKRFDNPVLPFNDGVYFASTEKSNIIRGWIFGTTLDSKTQSLLIVNNATNVVIKVCEFQFCNDPFLGVYYHKNNKSWMESEFRVYSSANNCTFEYVSQPFLMDLEGKQGNFKNLREFVFKNIDGYFKIYSKHTPINLVRDLPQGFSALEPLVDLPIGINITRFQTLLALHRSYLTPGDSSSGWTAGAAAYYVGYLQPRTFLLKYNENGTITDAVDCALDPLSETKCTLKSFTVEKGIYQTSNFRVQPTESIVRFPNITNLCPFGEVFNATRFASVYAWNRKRISNCVADYSVLYNSASFSTFKCYGVSPTKLNDLCFTNVYADSFVIRGDEVRQIAPGQTGKIADYNYKLPDDFTGCVIAWNSNNLDSKVGGNYNYLYRLFRKSNLKPFERDISTEIYQAGSTPCNGVEGFNCYFPLQSYGFQPTNGVGYQPYRVVVLSFELLHAPATVCGPKKSTNLVKNKCVNFNFNGLTGTGVLTESNKKFLPFQQFGRDIADTTDAVRDPQTLEILDITPCSFGGVSVITPGTNTSNQVAVLYQDVNCTEVPVAIHADQLTPTWRVYSTGSNVFQTRAGCLIGAEHVNNSYECDIPIGAGICASYQTQTNSPRRARSVASQSIIAYTMSLGAENSVAYSNNSIAIPTNFTISVTTEILPVSMTKTSVDCTMYICGDSTECSNLLLQYGSFCTQLNRALTGIAVEQDKNTQEVFAQVKQIYKTPPIKDFGGFNFSQILPDPSKPSKRSFIEDLLFNKVTLADAGFIKQYGDCLGDIAARDLICAQKFNGLTVLPPLLTDEMIAQYTSALLAGTITSGWTFGAGAALQIPFAMQMAYRFNGIGVTQNVLYENQKLIANQFNSAIGKIQDSLSSTASALGKLQDVVNQNAQALNTLVKQLSSNFGAISSVLNDILSRLDKVEAEVQIDRLITGRLQSLQTYVTQQLIRAAEIRASANLAATKMSECVLGQSKRVDFCGKGYHLMSFPQSAPHGVVFLHVTYVPAQEKNFTTAPAICHDGKAHFPREGVFVSNGTHWFVTQRNFYEPQIITTDNTFVSGNCDVVIGIVNNTVYDPLQPELDSFKEELDKYFKNHTSPDVDLGDISGINASVVNIQKEIDRLNEVAKNLNESLIDLQELGKYEQYIKWPWYIWLGFIAGLIAIVMVTIMLCCMTSCCSCLKGVSGLNNAVQNLQVEIGNNSAGIKGQVVALNTLVNGTNPNGSTVEERGLTNSIKANETNIASVTQEVNTAKGNISSLQGDVQALQEAGYIPEAPRDGQAYVRKDGEWVFLSTFL

SEQ ID NO: 129 - protein, 1286 aa, Artificial Sequence
  Chemically Synthesized
MPMGSLQPLATLYLLGMLVASVLASSQCVNLTTRTQLPPAYTNSFTRGVYYPDKVFRSSVLHSTQDLFLPFFSNVTWFHAIHVSGTNGTKRFDNPVLPFNDGVYFASTEKSNIIRGWIFGTTLDSKTQSLLIVNNATNVVIKVCEFQFCNDPFLGVYYHKNNKSWMESEFRVYSSANNCTFEYVSQPFLMDLEGKQGNFKNLREFVFKNIDGYFKIYSKHTPINLVRDLPQGFSALEPLVDLPIGINITRFQTLLALHRSYLTPGDSSSGWTAGAAAYYVGYLQPRTFLLKYNENGTITDAVDCALDPLSETKCTLKSFTVEKGIYQTSNFRVQPTESIVRFPNITNLCPFGEVFNATRFASVYAWNRKRISNCVADYSVLYNSASFSTFKCYGVSPTKLNDLCFTNVYADSFVIRGDEVRQIAPGQTGKIADYNYKLPDDFTGCVIAWNSNNLDSKVGGNYNYLYRLFRKSNLKPFERDISTEIYQAGSTPCNGVEGFNCYFPLQSYGFQPTNGVGYQPYRVVVLSFELLHAPATVCGPKKSTNLVKNKCVNFNFNGLTGTGVLTESNKKFLPFQQFGRDIADTTDAVRDPQTLEILDITPCSFGGVSVITPGTNTSNQVAVLYQDVNCTEVPVAIHADQLTPTWRVYSTGSNVFQTRAGCLIGAEHVNNSYECDIPIGAGICASYQTQTNSPRRARSVASQSIIAYTMSLGAENSVAYSNNSIAIPTNFTISVTTEILPVSMTKTSVDCTMYICGDSTECSNLLLQYGSFCTQLNRALTGIAVEQDKNTQEVFAQVKQIYKTPPIKDFGGFNFSQILPDPSKPSKRSFIEDLLFNKVTLADAGFIKQYGDCLGDIAARDLICAQKFNGLTVLPPLLTDEMIAQYTSALLAGTITSGWTFGAGAALQIPFAMQMAYRFNGIGVTQNVLYENQKLIANQFNSAIGKIQDSLSSTASALGKLQDVVNQNAQALNTLVKQLSSNFGAISSVLNDILSRLDKVEAEVQIDRLITGRLQSLQTYVTQQLIRAAEIRASANLAATKMSECVLGQSKRVDFCGKGYHLMSFPQSAPHGVVFLHVTYVPAQEKNFTTAPAICHDGKAHFPREGVFVSNGTHWFVTQRNFYEPQIITTDNTFVSGNCDVVIGIVNNTVYDPLQPELDSFKEELDKYFKNHTSPDVDLGDISGINASVVNIQKEIDRLNEVAKNLNESLIDLQELGKYEQYIKWPWYIWLGFIAGLIAIVMVTIMLCCMTSCCSCLKGGYIPEAPRDGQAYVRKDGEWVFLSTFL

SEQ ID NO: 130 - protein, 511 aa, Artificial Sequence
  Chemically Synthesized
MKCLLYLAFLFIGVNCKFTIVFPHNQKGNWKNVPSNYHYCPSSSDLNWHNDLIGTALQVKMPKSHKAIQADGWMCHASKWVTTCDFRWYGPKYITHSIRSFTPSVEQCKESIEQTKQGTWLNPGFPPQSCGYATVTDAEAVIVQVTPHHVLVDEYTGEWVDSQFINGKCSNYICPTVHNSTTWHSDYKVKGLCDSNLISMDITFFSEDGELSSLGKEGTGFRSNYFAYETGGKACKMQYCKHWGVRLPSGVWFEMADKDLFAAARFPECPEGSSISAPSQTSVDVSLIQDVERILDYSLCQETWSKIRAGLPISPVDLSYLAPKNPGTGPAFTIINGTLKYFETRYIRVDIAAPILSRMVGMISGTTTERELWDDWAPYEDVEIGPNGVLRTSSGYKFPLYMIGHGMLDSDLHLSSKAQVFEHPHIQDAASQLPDDESLFFGDTGLSKNPIELVEGWFSSWKSSIASFFFIIGLIIGLFLVLRVGIHLCIKLKHTKKRQIYTDIEMNRLGK

SEQ ID NO: 131 - protein, 607 aa, Artificial Sequence
  Chemically Synthesized
MEDAKNIKKGPAPFYPLEDGTAGEQLHKAMKRYALVPGTIAFTDAHIEVDITYAEYFEMSVRLAEAMKRYGLNTNHRIVVCSENSLQFFMPVLGALFIGVAVAPANDIYNERELLNSMGISQPTVVFVSKKGLQKILNVQKKLPIIQKIIIMDSKTDYQGFQSMYTFVTSHLPPGFNEYDFVPESFDRDKTIALIMNSSGSTGLPKGVALPHRTACVRFSHARDPIFGNQIIPDTAILSVVPFHHGFGMFTTLGYLICGFRVVLMYRFEEELFLRSLQDYKIQSALLVPTLFSFFAKSTLIDKYDLSNLHEIASGGAPLSKEVGEAVAKRFHLPGIRQGYGLTETTSAILITPEGDDKPGAVGKVVPFFEAKVVDLDTGKTLGVNQRGELCVRGPMIMSGYVNNPEATNALIDKDGWLHSGDIAYWDEDEHFFIVDRLKSLIKYKGYQVAPAELESILLQHPNIFDAGVAGLPDDDAGELPAAVVVLEHGKTMTEKEIVDYVASQVTTAKKLRGGVVFVDEVPKGLTGKLDARKIREILIKAKKGGKIAVACKNWFSSLSHFVIHLNSHGFPPEVEEQAAGTLPMSCAQESGMDRHPAACASARINV

SEQ ID NO: 132 - DNA, 3267 bp, Artificial Sequence
  Chemically Synthesized
aacatccccgctctggtggaaaaccagaagaagtactttggcacctacagcgtgatggccatgctgaacgctcagaccgtgctggaccacatccagaaggtggccgatattgagggcgagcagaacgagaacaacgagaatctgtggtttcaccccgtgatgagccacctgtacaacgccaagaacggctacgacaagcagcccgagaaaaccatgttcatcatcgagcggctgcagagctacttcccattcctgaagatcatggccgagaaccagagagagtacagcaacggcaagtacaagcagaaccgcgtggaagtgaacagcaacgacatcttcgaggtgctgaagcgcgccttcggcgtgctgaagatgtacagggacctgaccaaccactacaagacctacgaggaaaagctgaacgacggctgcgagttcctgaccagcacagagcaacctctgagcggcatgatcaacaactactacacagtggccctgcggaacatgaacgagagatacggctacaagacagaggacctggccttcatccaggacaagcggttcaagttcgtgaaggacgcctacggcaagaaaaagtcccaagtgaataccggattcttcctgagcctgcaggactacaacggcgacacacagaagaagctgcacctgagcggagtgggaatcgccctgctgatctgcctgttcctggacaagcagtacatcaacatctttctgagcaggctgcccatcttctccagctacaatgcccagagcgaggaacggcggatcatcatcagatccttcggcatcaacagcatcaagctgcccaaggaccggatccacagcgagaagtccaacaagagcgtggccatggatatgctcaacgaagtgaagcggtgccccgacgagctgttcacaacactgtctgccgagaagcagtcccggttcagaatcatcagcgacgaccacaatgaagtgctgatgaagcggagcagcgacagattcgtgcctctgctgctgcagtatatcgattacggcaagctgttcgaccacatcaggttccacgtgaacatgggcaagctgagatacctgctgaaggccgacaagacctgcatcgacggccagaccagagtcagagtgatcgagcagcccctgaacggcttcggcagactggaagaggccgagacaatgcggaagcaagagaacggcaccttcggcaacagcggcatccggatcagagacttcgagaacatgaagcgggacgacgccaatcctgccaactatccctacatcgtggacacctacacacactacatcctggaaaacaacaaggtcgagatgtttatcaacgacaaagaggacagcgccccactgctgcccgtgatcgaggatgatagatacgtggtcaagacaatccccagctgccggatgagcaccctggaaattccagccatggccttccacatgtttctgttcggcagcaagaaaaccgagaagctgatcgtggacgtgcacaaccggtacaagagactgttccaggccatgcagaaagaagaagtgaccgccgagaatatcgccagcttcggaatcgccgagagcgacctgcctcagaagatcctggatctgatcagcggcaatgcccacggcaaggatgtggacgccttcatcagactgaccgtggacgacatgctgaccgacaccgagcggagaatcaagagattcaaggacgaccggaagtccattcggagcgccgacaacaagatgggaaagagaggcttcaagcagatctccacaggcaagctggccgacttcctggccaaggacatcgtgctgtttcagcccagcgtgaacgatggcgagaacaagatcaccggcctgaactaccggatcatgcagagcgccattgccgtgtacgatagcggcgacgattacgaggccaagcagcagttcaagctgatgttcgagaaggcccggctgatcggcaagggcacaacagagcctcatccatttctgtacaaggtgttcgcccgcagcatccccgccaatgccgtcgagttctacgagcgctacctgatcgagcggaagttctacctgaccggcctgtccaacgagatcaagaaaggcaacagagtggatgtgcccttcatccggcgggaccagaacaagtggaaaacacccgccatgaagaccctgggcagaatctacagcgaggatctgcccgtggaactgcccagacagatgttcgacaatgagatcaagtcccacctgaagtccctgccacagatggaaggcatcgacttcaacaatgccaacgtgacctatctgatcgccgagtacatgaagagagtgctggacgacgacttccagaccttctaccagtggaaccgcaactaccggtacatggacatgcttaagggcgagtacgacagaaagggctccctgcagcactgcttcaccagcgtggaagagagagaaggcctctggaaagagcgggcctccagaacagagcggtacagaaagcaggccagcaacaagatccgcagcaaccggcagatgagaaacgccagcagcgaagagatcgagacaatcctggataagcggctgagcaacagccggaacgagtaccagaaaagcgagaaagtgatccggcgctacagagtgcaggatgccctgctgtttctgctggccaaaaagaccctgaccgaactggccgatttcgacggcgagaggttcaaactgaaagaaatcatgcccgacgccgagaagggaatcctgagcgagatcatgcccatgagcttcaccttcgagaaaggcggcaagaagtacaccatcaccagcgagggcatgaagctgaagaactacggcgacttctttgtgctggctagcgacaagaggatcggcaacctgctggaactcgtgggcagcgacatcgtgtccaaagaggatatcatggaagagttcaacaaatacgaccagtgcaggcccgagatcagctccatcgtgttcaacctggaaaagtgggccttcgacacataccccgagctgtctgccagagtggaccgggaagagaaggtggacttcaagagcatcctgaaaatcctgctgaacaacaagaacatcaacaaagagcagagcgacatcctgcggaagatccggaacgccttcgatcacaacaattaccccgacaaaggcgtggtggaaatcaaggccctgcctgagatcgccatgagcatcaagaaggcctttggggagtacgccatcatgaag

SEQ ID NO: 133 - DNA, 2946 bp, Artificial Sequence
  Chemically Synthesized
aacatccccgctctggtggaaaaccagaagaagtactttggcacctacagcgtgatggccatgctgaacgctcagaccgtgctggaccacatccagaaggtggccgatattgagggcgagcagaacgagaacaacgagaatctgtggtttcaccccgtgatgagccacctgtacaacgccaagaacggctacgacaagcagcccgagaaaaccatgttcatcatcgagcggctgcagagctacttcccattcctgaagatcatggccgagaaccagagagagtacagcaacggcaagtacaagcagaaccgcgtggaagtgaacagcaacgacatcttcgaggtgctgaagcgcgccttcggcgtgctgaagatgtacagggacctgaccaaccactacaagacctacgaggaaaagctgaacgacggctgcgagttcctgaccagcacagagcaacctctgagcggcatgatcaacaactactacacagtggccctgcggaacatgaacgagagatacggctacaagacagaggacctggccttcatccaggacaagcggttcaagttcgtgaaggacgcctacggcaagaaaaagtcccaagtgaataccggattcttcctgagcctgcaggactacaacggcgacacacagaagaagctgcacctgagcggagtgggaatcgccctgctgatctgcctgttcctggacaagcagtacatcaacatctttctgagcaggctgcccatcttctccagctacaatgcccagagcgaggaacggcggatcatcatcagatccttcggcatcaacagcatcaagctgcccaaggaccggatccacagcgagaagtccaacaagagcgtggccatggatatgctcaacgaagtgaagcggtgccccgacgagctgttcacaacactgtctgccgagaagcagtcccggttcagaatcatcagcgacgaccacaatgaagtgctgatgaagcggagcagcgacagattcgtgcctctgctgctgcagtatatcgattacggcaagctgttcgaccacatcaggttccacgtgaacatgggcaagctgagatacctgctgaaggccgacaagacctgcatcgacggccagaccagagtcagagtgatcgagcagcccctgaacggcttcggcagactggaagaggccgagacaatgcggaagcaagagaacggcaccttcggcaacagcggcatccggatcagagacttcgagaacatgaagcgggacgacgccaatcctgccaactatccctacatcgtggacacctacacacactacatcctggaaaacaacaaggtcgagatgtttatcaacgacaaagaggacagcgccccactgctgcccgtgatcgaggatgatagatacgtggtcaagacaatccccagctgccggatgagcaccctggaaattccagccatggccttccacatgtttctgttcggcagcaagaaaaccgagaagctgatcgtggacgtgcacaaccggtacaagagactgttccaggccatgcagaaagaagaagtgaccgccgagaatatcgccagcttcggaatcgccgagagcgacctgcctcagaagatcctggatctgatcagcggcaatgcccacggcaaggatgtggacgccttcatcagactgaccgtggacgacatgctgaccgacaccgagcggagaatcaagagattcaaggacgaccggaagtccattcggagcgccgacaacaagatgggaaagagaggcttcaagcagatctccacaggcaagctggccgacttcctggccaaggacatcgtgctgtttcagcccagcgtgaacgatggcgagaacaagatcaccggcctgaactaccggatcatgcagagcgccattgccgtgtacgatagcggcgacgattacgaggccaagcagcagttcaagctgatgttcgagaaggcccggctgatcggcaagggcacaacagagcctcatccatttctgtacaaggtgttcgcccgcagcatccccgccaatgccgtcgagttctacgagcgctacctgatcgagcggaagttctacctgaccggcctgtccaacgagatcaagaaaggcaacagagtggatgtgcccttcatccggcgggaccagaacaagtggaaaacacccgccatgaagaccctgggcagaatctacagcgaggatctgcccgtggaactgcccagacagatgttcgacaatgagatcaagtcccacctgaagtccctgccacagatggaaggcatcgacttcaacaatgccaacgtgacctatctgatcgccgagtacatgaagagagtgctggacgacgacttccagaccttctaccagtggaaccgcaactaccggtacatggacatgcttaagggcgagtacgacagaaagggctccctgcagcactgcttcaccagcgtggaagagagagaaggcctctggaaagagcgggcctccagaacagagcggtacagaaagcaggccagcaacaagatccgcagcaaccggcagatgagaaacgccagcagcgaagagatcgagacaatcctggataagcggctgagcaacagccggaacgagtaccagaaaagcgagaaagtgatccggcgctacagagtgcaggatgccctgctgtttctgctggccaaaaagaccctgaccgaactggccgatttcgacggcgagaggttcaaactgaaagaaatcatgcccgacgccgagaagggaatcctgagcgagatcatgcccatgagcttcaccttcgagaaaggcggcaagaagtacaccatcaccagcgagggcatgaagctgaagaactacggcgacttctttgtgctggctagcgacaagaggatcggcaacctgctggaactcgtgggcagcgacatcgtgtccaaagaggat

SEQ ID NO: 134 - DNA, 3267 bp, Artificial Sequence
  Chemically Synthesized
aacatccccgctctggtggaaaaccagaagaagtactttggcacctacagcgtgatggccatgctgaacgctcagaccgtgctggaccacatccagaaggtggccgatattgagggcgagcagaacgagaacaacgagaatctgtggtttcaccccgtgatgagccacctgtacaacgccaagaacggctacgacaagcagcccgagaaaaccatgttcatcatcgagcggctgcagagctacttcccattcctgaagatcatggccgagaaccagagagagtacagcaacggcaagtacaagcagaaccgcgtggaagtgaacagcaacgacatcttcgaggtgctgaagcgcgccttcggcgtgctgaagatgtacagggacctgaccaacgcatacaagacctacgaggaaaagctgaacgacggctgcgagttcctgaccagcacagagcaacctctgagcggcatgatcaacaactactacacagtggccctgcggaacatgaacgagagatacggctacaagacagaggacctggccttcatccaggacaagcggttcaagttcgtgaaggacgcctacggcaagaaaaagtcccaagtgaataccggattcttcctgagcctgcaggactacaacggcgacacacagaagaagctgcacctgagcggagtgggaatcgccctgctgatctgcctgttcctggacaagcagtacatcaacatctttctgagcaggctgcccatcttctccagctacaatgcccagagcgaggaacggcggatcatcatcagatccttcggcatcaacagcatcaagctgcccaaggaccggatccacagcgagaagtccaacaagagcgtggccatggatatgctcaacgaagtgaagcggtgccccgacgagctgttcacaacactgtctgccgagaagcagtcccggttcagaatcatcagcgacgaccacaatgaagtgctgatgaagcggagcagcgacagattcgtgcctctgctgctgcagtatatcgattacggcaagctgttcgaccacatcaggttccacgtgaacatgggcaagctgagatacctgctgaaggccgacaagacctgcatcgacggccagaccagagtcagagtgatcgagcagcccctgaacggcttcggcagactggaagaggccgagacaatgcggaagcaagagaacggcaccttcggcaacagcggcatccggatcagagacttcgagaacatgaagcgggacgacgccaatcctgccaactatccctacatcgtggacacctacacacactacatcctggaaaacaacaaggtcgagatgtttatcaacgacaaagaggacagcgccccactgctgcccgtgatcgaggatgatagatacgtggtcaagacaatccccagctgccggatgagcaccctggaaattccagccatggccttccacatgtttctgttcggcagcaagaaaaccgagaagctgatcgtggacgtgcacaaccggtacaagagactgttccaggccatgcagaaagaagaagtgaccgccgagaatatcgccagcttcggaatcgccgagagcgacctgcctcagaagatcctggatctgatcagcggcaatgcccacggcaaggatgtggacgccttcatcagactgaccgtggacgacatgctgaccgacaccgagcggagaatcaagagattcaaggacgaccggaagtccattcggagcgccgacaacaagatgggaaagagaggcttcaagcagatctccacaggcaagctggccgacttcctggccaaggacatcgtgctgtttcagcccagcgtgaacgatggcgagaacaagatcaccggcctgaactaccggatcatgcagagcgccattgccgtgtacgatagcggcgacgattacgaggccaagcagcagttcaagctgatgttcgagaaggcccggctgatcggcaagggcacaacagagcctcatccatttctgtacaaggtgttcgcccgcagcatccccgccaatgccgtcgagttctacgagcgctacctgatcgagcggaagttctacctgaccggcctgtccaacgagatcaagaaaggcaacagagtggatgtgcccttcatccggcgggaccagaacaagtggaaaacacccgccatgaagaccctgggcagaatctacagcgaggatctgcccgtggaactgcccagacagatgttcgacaatgagatcaagtcccacctgaagtccctgccacagatggaaggcatcgacttcaacaatgccaacgtgacctatctgatcgccgagtacatgaagagagtgctggacgacgacttccagaccttctaccagtggaaccgcaactaccggtacatggacatgcttaagggcgagtacgacagaaagggctccctgcagcactgcttcaccagcgtggaagagagagaaggcctctggaaagagcgggcctccagaacagagcggtacagaaagcaggccagcaacaagatccgcagcaaccggcagatgagaaacgccagcagcgaagagatcgagacaatcctggataagcggctgagcaacagccggaacgagtaccagaaaagcgagaaagtgatccggcgctacagagtgcaggatgccctgctgtttctgctggccaaaaagaccctgaccgaactggccgatttcgacggcgagaggttcaaactgaaagaaatcatgcccgacgccgagaagggaatcctgagcgagatcatgcccatgagcttcaccttcgagaaaggcggcaagaagtacaccatcaccagcgagggcatgaagctgaagaactacggcgacttctttgtgctggctagcgacaagaggatcggcaacctgctggaactcgtgggcagcgacatcgtgtccaaagaggatatcatggaagagttcaacaaatacgaccagtgcaggcccgagatcagctccatcgtgttcaacctggaaaagtgggccttcgacacataccccgagctgtctgccagagtggaccgggaagagaaggtggacttcaagagcatcctgaaaatcctgctgaacaacaagaacatcaacaaagagcagagcgacatcctgcggaagatccggaacgccttcgatgcaaacaattaccccgacaaaggcgtggtggaaatcaaggccctgcctgagatcgccatgagcatcaagaaggcctttggggagtacgccatcatgaag

SEQ ID NO: 135 - DNA, 2946 bp, Artificial Sequence
  Chemically Synthesized
aacatccccgctctggtggaaaaccagaagaagtactttggcacctacagcgtgatggccatgctgaacgctcagaccgtgctggaccacatccagaaggtggccgatattgagggcgagcagaacgagaacaacgagaatctgtggtttcaccccgtgatgagccacctgtacaacgccaagaacggctacgacaagcagcccgagaaaaccatgttcatcatcgagcggctgcagagctacttcccattcctgaagatcatggccgagaaccagagagagtacagcaacggcaagtacaagcagaaccgcgtggaagtgaacagcaacgacatcttcgaggtgctgaagcgcgccttcggcgtgctgaagatgtacagggacctgaccaacgcatacaagacctacgaggaaaagctgaacgacggctgcgagttcctgaccagcacagagcaacctctgagcggcatgatcaacaactactacacagtggccctgcggaacatgaacgagagatacggctacaagacagaggacctggccttcatccaggacaagcggttcaagttcgtgaaggacgcctacggcaagaaaaagtcccaagtgaataccggattcttcctgagcctgcaggactacaacggcgacacacagaagaagctgcacctgagcggagtgggaatcgccctgctgatctgcctgttcctggacaagcagtacatcaacatctttctgagcaggctgcccatcttctccagctacaatgcccagagcgaggaacggcggatcatcatcagatccttcggcatcaacagcatcaagctgcccaaggaccggatccacagcgagaagtccaacaagagcgtggccatggatatgctcaacgaagtgaagcggtgccccgacgagctgttcacaacactgtctgccgagaagcagtcccggttcagaatcatcagcgacgaccacaatgaagtgctgatgaagcggagcagcgacagattcgtgcctctgctgctgcagtatatcgattacggcaagctgttcgaccacatcaggttccacgtgaacatgggcaagctgagatacctgctgaaggccgacaagacctgcatcgacggccagaccagagtcagagtgatcgagcagcccctgaacggcttcggcagactggaagaggccgagacaatgcggaagcaagagaacggcaccttcggcaacagcggcatccggatcagagacttcgagaacatgaagcgggacgacgccaatcctgccaactatccctacatcgtggacacctacacacactacatcctggaaaacaacaaggtcgagatgtttatcaacgacaaagaggacagcgccccactgctgcccgtgatcgaggatgatagatacgtggtcaagacaatccccagctgccggatgagcaccctggaaattccagccatggccttccacatgtttctgttcggcagcaagaaaaccgagaagctgatcgtggacgtgcacaaccggtacaagagactgttccaggccatgcagaaagaagaagtgaccgccgagaatatcgccagcttcggaatcgccgagagcgacctgcctcagaagatcctggatctgatcagcggcaatgcccacggcaaggatgtggacgccttcatcagactgaccgtggacgacatgctgaccgacaccgagcggagaatcaagagattcaaggacgaccggaagtccattcggagcgccgacaacaagatgggaaagagaggcttcaagcagatctccacaggcaagctggccgacttcctggccaaggacatcgtgctgtttcagcccagcgtgaacgatggcgagaacaagatcaccggcctgaactaccggatcatgcagagcgccattgccgtgtacgatagcggcgacgattacgaggccaagcagcagttcaagctgatgttcgagaaggcccggctgatcggcaagggcacaacagagcctcatccatttctgtacaaggtgttcgcccgcagcatccccgccaatgccgtcgagttctacgagcgctacctgatcgagcggaagttctacctgaccggcctgtccaacgagatcaagaaaggcaacagagtggatgtgcccttcatccggcgggaccagaacaagtggaaaacacccgccatgaagaccctgggcagaatctacagcgaggatctgcccgtggaactgcccagacagatgttcgacaatgagatcaagtcccacctgaagtccctgccacagatggaaggcatcgacttcaacaatgccaacgtgacctatctgatcgccgagtacatgaagagagtgctggacgacgacttccagaccttctaccagtggaaccgcaactaccggtacatggacatgcttaagggcgagtacgacagaaagggctccctgcagcactgcttcaccagcgtggaagagagagaaggcctctggaaagagcgggcctccagaacagagcggtacagaaagcaggccagcaacaagatccgcagcaaccggcagatgagaaacgccagcagcgaagagatcgagacaatcctggataagcggctgagcaacagccggaacgagtaccagaaaagcgagaaagtgatccggcgctacagagtgcaggatgccctgctgtttctgctggccaaaaagaccctgaccgaactggccgatttcgacggcgagaggttcaaactgaaagaaatcatgcccgacgccgagaagggaatcctgagcgagatcatgcccatgagcttcaccttcgagaaaggcggcaagaagtacaccatcaccagcgagggcatgaagctgaagaactacggcgacttctttgtgctggctagcgacaagaggatcggcaacctgctggaactcgtgggcagcgacatcgtgtccaaagaggat

SEQ ID NO: 136 - DNA, 117 bp, Artificial Sequence
  Chemically Synthesized
aactcaaagaaaaggtcactggaggacaacgaaacggaaatcaaagtctccagagacacctggaacactaagaacatgcggtccctggaaccgccacgaagcaagaaacggatacat

SEQ ID NO: 137 - DNA, 33 bp, Artificial Sequence
  Chemically Synthesized
cttcaactgcctccacttgaaagactgacactg

SEQ ID NO: 138 - DNA, 48 bp, Artificial Sequence
  Chemically Synthesized
ggatcccttcaactgcctccacttgaaagactgacactgggtagttcc

SEQ ID NO: 139 - DNA, 96 bp, Artificial Sequence
  Chemically Synthesized
atgagtgtgttgacgccgttgcttctgcgagggcttaccgggtctgctagaagacttccggtccccagggccaagatacatagcctcggagacccg

SEQ ID NO: 140 - DNA, 390 bp, Artificial Sequence
  Chemically Synthesized
atgagtgtgttgacgccgttgcttctgcgagggcttaccgggtctgctagaagacttccggtccccagggccaagatacatagcctcggagacccgatgtctgtgctcactcctctgcttttgcgaggactgactgggtccgccagacgactcccggtgccgagagctaaaatccatagcctgggaaaattggcaactatgtcagtcctgacgccgcttcttctccggggtcttacagggtctgcaagaaggctgcctgtacctcgggcgaaaattcatagcttgggcgacccgatgagtgtattgacgcccctgttgctgagaggattgactgggtcagcgcgccggctccctgtcccccgagctaagattcactcccttggtaagctg

SEQ ID NO: 141 - DNA, 60 bp, Artificial Sequence
  Chemically Synthesized
atgtacaggatgcaactcctgtcttgcattgcactaagtcttgcacttgtcacgaattcc

SEQ ID NO: 142 - DNA, 129 bp, Artificial Sequence
  Chemically Synthesized
atgggttgttgtttcagcaagacagcggcgaaaggtgaagcagcagcagaaagaccaggcgaggctgcggtagcatcaagtccctccaaggctaatgggcaggaaaacggacacgtcaaagttggaagc

SEQ ID NO: 143 - DNA, 51 bp, Artificial Sequence
  Chemically Synthesized
atgctgctgcccgtccccctgctgctgggcctgctgggcgccgccgccgac

SEQ ID NO: 144 - DNA, 30 bp, Artificial Sequence
  Chemically Synthesized
gggatcactctcggcaaggacgagctgtaa

SEQ ID NO: 145 - DNA, 12 bp, Artificial Sequence
  Chemically Synthesized
tccaaattataa

SEQ ID NO: 146 - DNA, 66 bp, Artificial Sequence
  Chemically Synthesized
gactacaaagaccatgacggtgattataaagatcatgacatcgattacaaggatgacgatgacaag

SEQ ID NO: 147 - DNA, 3471 bp, Artificial Sequence
  Chemically Synthesized
atggactacaaagaccatgacggtgattataaagatcatgacatcgattacaaggatgacgatgacaagggcggaaactcaaagaaaaggtcactggaggacaacgaaacggaaatcaaagtctccagagacacctggaacactaagaacatgcggtccctggaaccgccacgaagcaagaaacggatacatggaggcaacatccccgctctggtggaaaaccagaagaagtactttggcacctacagcgtgatggccatgctgaacgctcagaccgtgctggaccacatccagaaggtggccgatattgagggcgagcagaacgagaacaacgagaatctgtggtttcaccccgtgatgagccacctgtacaacgccaagaacggctacgacaagcagcccgagaaaaccatgttcatcatcgagcggctgcagagctacttcccattcctgaagatcatggccgagaaccagagagagtacagcaacggcaagtacaagcagaaccgcgtggaagtgaacagcaacgacatcttcgaggtgctgaagcgcgccttcggcgtgctgaagatgtacagggacctgaccaaccactacaagacctacgaggaaaagctgaacgacggctgcgagttcctgaccagcacagagcaacctctgagcggcatgatcaacaactactacacagtggccctgcggaacatgaacgagagatacggctacaagacagaggacctggccttcatccaggacaagcggttcaagttcgtgaaggacgcctacggcaagaaaaagtcccaagtgaataccggattcttcctgagcctgcaggactacaacggcgacacacagaagaagctgcacctgagcggagtgggaatcgccctgctgatctgcctgttcctggacaagcagtacatcaacatctttctgagcaggctgcccatcttctccagctacaatgcccagagcgaggaacggcggatcatcatcagatccttcggcatcaacagcatcaagctgcccaaggaccggatccacagcgagaagtccaacaagagcgtggccatggatatgctcaacgaagtgaagcggtgccccgacgagctgttcacaacactgtctgccgagaagcagtcccggttcagaatcatcagcgacgaccacaatgaagtgctgatgaagcggagcagcgacagattcgtgcctctgctgctgcagtatatcgattacggcaagctgttcgaccacatcaggttccacgtgaacatgggcaagctgagatacctgctgaaggccgacaagacctgcatcgacggccagaccagagtcagagtgatcgagcagcccctgaacggcttcggcagactggaagaggccgagacaatgcggaagcaagagaacggcaccttcggcaacagcggcatccggatcagagacttcgagaacatgaagcgggacgacgccaatcctgccaactatccctacatcgtggacacctacacacactacatcctggaaaacaacaaggtcgagatgtttatcaacgacaaagaggacagcgccccactgctgcccgtgatcgaggatgatagatacgtggtcaagacaatccccagctgccggatgagcaccctggaaattccagccatggccttccacatgtttctgttcggcagcaagaaaaccgagaagctgatcgtggacgtgcacaaccggtacaagagactgttccaggccatgcagaaagaagaagtgaccgccgagaatatcgccagcttcggaatcgccgagagcgacctgcctcagaagatcctggatctgatcagcggcaatgcccacggcaaggatgtggacgccttcatcagactgaccgtggacgacatgctgaccgacaccgagcggagaatcaagagattcaaggacgaccggaagtccattcggagcgccgacaacaagatgggaaagagaggcttcaagcagatctccacaggcaagctggccgacttcctggccaaggacatcgtgctgtttcagcccagcgtgaacgatggcgagaacaagatcaccggcctgaactaccggatcatgcagagcgccattgccgtgtacgatagcggcgacgattacgaggccaagcagcagttcaagctgatgttcgagaaggcccggctgatcggcaagggcacaacagagcctcatccatttctgtacaaggtgttcgcccgcagcatccccgccaatgccgtcgagttctacgagcgctacctgatcgagcggaagttctacctgaccggcctgtccaacgagatcaagaaaggcaacagagtggatgtgcccttcatccggcgggaccagaacaagtggaaaacacccgccatgaagaccctgggcagaatctacagcgaggatctgcccgtggaactgcccagacagatgttcgacaatgagatcaagtcccacctgaagtccctgccacagatggaaggcatcgacttcaacaatgccaacgtgacctatctgatcgccgagtacatgaagagagtgctggacgacgacttccagaccttctaccagtggaaccgcaactaccggtacatggacatgcttaagggcgagtacgacagaaagggctccctgcagcactgcttcaccagcgtggaagagagagaaggcctctggaaagagcgggcctccagaacagagcggtacagaaagcaggccagcaacaagatccgcagcaaccggcagatgagaaacgccagcagcgaagagatcgagacaatcctggataagcggctgagcaacagccggaacgagtaccagaaaagcgagaaagtgatccggcgctacagagtgcaggatgccctgctgtttctgctggccaaaaagaccctgaccgaactggccgatttcgacggcgagaggttcaaactgaaagaaatcatgcccgacgccgagaagggaatcctgagcgagatcatgcccatgagcttcaccttcgagaaaggcggcaagaagtacaccatcaccagcgagggcatgaagctgaagaactacggcgacttctttgtgctggctagcgacaagaggatcggcaacctgctggaactcgtgggcagcgacatcgtgtccaaagaggatatcatggaagagttcaacaaatacgaccagtgcaggcccgagatcagctccatcgtgttcaacctggaaaagtgggccttcgacacataccccgagctgtctgccagagtggaccgggaagagaaggtggacttcaagagcatcctgaaaatcctgctgaacaacaagaacatcaacaaagagcagagcgacatcctgcggaagatccggaacgccttcgatcacaacaattaccccgacaaaggcgtggtggaaatcaaggccctgcctgagatcgccatgagcatcaagaaggcctttggggagtacgccatcatgaagtagtaa

SEQ ID NO: 148 - DNA, 3387 bp, Artificial Sequence
  Chemically Synthesized
atggactacaaagaccatgacggtgattataaagatcatgacatcgattacaaggatgacgatgacaagggcggacttcaactgcctccacttgaaagactgacactgggaggcaacatccccgctctggtggaaaaccagaagaagtactttggcacctacagcgtgatggccatgctgaacgctcagaccgtgctggaccacatccagaaggtggccgatattgagggcgagcagaacgagaacaacgagaatctgtggtttcaccccgtgatgagccacctgtacaacgccaagaacggctacgacaagcagcccgagaaaaccatgttcatcatcgagcggctgcagagctacttcccattcctgaagatcatggccgagaaccagagagagtacagcaacggcaagtacaagcagaaccgcgtggaagtgaacagcaacgacatcttcgaggtgctgaagcgcgccttcggcgtgctgaagatgtacagggacctgaccaaccactacaagacctacgaggaaaagctgaacgacggctgcgagttcctgaccagcacagagcaacctctgagcggcatgatcaacaactactacacagtggccctgcggaacatgaacgagagatacggctacaagacagaggacctggccttcatccaggacaagcggttcaagttcgtgaaggacgcctacggcaagaaaaagtcccaagtgaataccggattcttcctgagcctgcaggactacaacggcgacacacagaagaagctgcacctgagcggagtgggaatcgccctgctgatctgcctgttcctggacaagcagtacatcaacatctttctgagcaggctgcccatcttctccagctacaatgcccagagcgaggaacggcggatcatcatcagatccttcggcatcaacagcatcaagctgcccaaggaccggatccacagcgagaagtccaacaagagcgtggccatggatatgctcaacgaagtgaagcggtgccccgacgagctgttcacaacactgtctgccgagaagcagtcccggttcagaatcatcagcgacgaccacaatgaagtgctgatgaagcggagcagcgacagattcgtgcctctgctgctgcagtatatcgattacggcaagctgttcgaccacatcaggttccacgtgaacatgggcaagctgagatacctgctgaaggccgacaagacctgcatcgacggccagaccagagtcagagtgatcgagcagcccctgaacggcttcggcagactggaagaggccgagacaatgcggaagcaagagaacggcaccttcggcaacagcggcatccggatcagagacttcgagaacatgaagcgggacgacgccaatcctgccaactatccctacatcgtggacacctacacacactacatcctggaaaacaacaaggtcgagatgtttatcaacgacaaagaggacagcgccccactgctgcccgtgatcgaggatgatagatacgtggtcaagacaatccccagctgccggatgagcaccctggaaattccagccatggccttccacatgtttctgttcggcagcaagaaaaccgagaagctgatcgtggacgtgcacaaccggtacaagagactgttccaggccatgcagaaagaagaagtgaccgccgagaatatcgccagcttcggaatcgccgagagcgacctgcctcagaagatcctggatctgatcagcggcaatgcccacggcaaggatgtggacgccttcatcagactgaccgtggacgacatgctgaccgacaccgagcggagaatcaagagattcaaggacgaccggaagtccattcggagcgccgacaacaagatgggaaagagaggcttcaagcagatctccacaggcaagctggccgacttcctggccaaggacatcgtgctgtttcagcccagcgtgaacgatggcgagaacaagatcaccggcctgaactaccggatcatgcagagcgccattgccgtgtacgatagcggcgacgattacgaggccaagcagcagttcaagctgatgttcgagaaggcccggctgatcggcaagggcacaacagagcctcatccatttctgtacaaggtgttcgcccgcagcatccccgccaatgccgtcgagttctacgagcgctacctgatcgagcggaagttctacctgaccggcctgtccaacgagatcaagaaaggcaacagagtggatgtgcccttcatccggcgggaccagaacaagtggaaaacacccgccatgaagaccctgggcagaatctacagcgaggatctgcccgtggaactgcccagacagatgttcgacaatgagatcaagtcccacctgaagtccctgccacagatggaaggcatcgacttcaacaatgccaacgtgacctatctgatcgccgagtacatgaagagagtgctggacgacgacttccagaccttctaccagtggaaccgcaactaccggtacatggacatgcttaagggcgagtacgacagaaagggctccctgcagcactgcttcaccagcgtggaagagagagaaggcctctggaaagagcgggcctccagaacagagcggtacagaaagcaggccagcaacaagatccgcagcaaccggcagatgagaaacgccagcagcgaagagatcgagacaatcctggataagcggctgagcaacagccggaacgagtaccagaaaagcgagaaagtgatccggcgctacagagtgcaggatgccctgctgtttctgctggccaaaaagaccctgaccgaactggccgatttcgacggcgagaggttcaaactgaaagaaatcatgcccgacgccgagaagggaatcctgagcgagatcatgcccatgagcttcaccttcgagaaaggcggcaagaagtacaccatcaccagcgagggcatgaagctgaagaactacggcgacttctttgtgctggctagcgacaagaggatcggcaacctgctggaactcgtgggcagcgacatcgtgtccaaagaggatatcatggaagagttcaacaaatacgaccagtgcaggcccgagatcagctccatcgtgttcaacctggaaaagtgggccttcgacacataccccgagctgtctgccagagtggaccgggaagagaaggtggacttcaagagcatcctgaaaatcctgctgaacaacaagaacatcaacaaagagcagagcgacatcctgcggaagatccggaacgccttcgatcacaacaattaccccgacaaaggcgtggtggaaatcaaggccctgcctgagatcgccatgagcatcaagaaggcctttggggagtacgccatcatgaagtagtaa

SEQ ID NO: 149 - DNA, 3402 bp, Artificial Sequence
  Chemically Synthesized
atggactacaaagaccatgacggtgattataaagatcatgacatcgattacaaggatgacgatgacaagggcggaggatcccttcaactgcctccacttgaaagactgacactgggtagttccggaggcaacatccccgctctggtggaaaaccagaagaagtactttggcacctacagcgtgatggccatgctgaacgctcagaccgtgctggaccacatccagaaggtggccgatattgagggcgagcagaacgagaacaacgagaatctgtggtttcaccccgtgatgagccacctgtacaacgccaagaacggctacgacaagcagcccgagaaaaccatgttcatcatcgagcggctgcagagctacttcccattcctgaagatcatggccgagaaccagagagagtacagcaacggcaagtacaagcagaaccgcgtggaagtgaacagcaacgacatcttcgaggtgctgaagcgcgccttcggcgtgctgaagatgtacagggacctgaccaaccactacaagacctacgaggaaaagctgaacgacggctgcgagttcctgaccagcacagagcaacctctgagcggcatgatcaacaactactacacagtggccctgcggaacatgaacgagagatacggctacaagacagaggacctggccttcatccaggacaagcggttcaagttcgtgaaggacgcctacggcaagaaaaagtcccaagtgaataccggattcttcctgagcctgcaggactacaacggcgacacacagaagaagctgcacctgagcggagtgggaatcgccctgctgatctgcctgttcctggacaagcagtacatcaacatctttctgagcaggctgcccatcttctccagctacaatgcccagagcgaggaacggcggatcatcatcagatccttcggcatcaacagcatcaagctgcccaaggaccggatccacagcgagaagtccaacaagagcgtggccatggatatgctcaacgaagtgaagcggtgccccgacgagctgttcacaacactgtctgccgagaagcagtcccggttcagaatcatcagcgacgaccacaatgaagtgctgatgaagcggagcagcgacagattcgtgcctctgctgctgcagtatatcgattacggcaagctgttcgaccacatcaggttccacgtgaacatgggcaagctgagatacctgctgaaggccgacaagacctgcatcgacggccagaccagagtcagagtgatcgagcagcccctgaacggcttcggcagactggaagaggccgagacaatgcggaagcaagagaacggcaccttcggcaacagcggcatccggatcagagacttcgagaacatgaagcgggacgacgccaatcctgccaactatccctacatcgtggacacctacacacactacatcctggaaaacaacaaggtcgagatgtttatcaacgacaaagaggacagcgccccactgctgcccgtgatcgaggatgatagatacgtggtcaagacaatccccagctgccggatgagcaccctggaaattccagccatggccttccacatgtttctgttcggcagcaagaaaaccgagaagctgatcgtggacgtgcacaaccggtacaagagactgttccaggccatgcagaaagaagaagtgaccgccgagaatatcgccagcttcggaatcgccgagagcgacctgcctcagaagatcctggatctgatcagcggcaatgcccacggcaaggatgtggacgccttcatcagactgaccgtggacgacatgctgaccgacaccgagcggagaatcaagagattcaaggacgaccggaagtccattcggagcgccgacaacaagatgggaaagagaggcttcaagcagatctccacaggcaagctggccgacttcctggccaaggacatcgtgctgtttcagcccagcgtgaacgatggcgagaacaagatcaccggcctgaactaccggatcatgcagagcgccattgccgtgtacgatagcggcgacgattacgaggccaagcagcagttcaagctgatgttcgagaaggcccggctgatcggcaagggcacaacagagcctcatccatttctgtacaaggtgttcgcccgcagcatccccgccaatgccgtcgagttctacgagcgctacctgatcgagcggaagttctacctgaccggcctgtccaacgagatcaagaaaggcaacagagtggatgtgcccttcatccggcgggaccagaacaagtggaaaacacccgccatgaagaccctgggcagaatctacagcgaggatctgcccgtggaactgcccagacagatgttcgacaatgagatcaagtcccacctgaagtccctgccacagatggaaggcatcgacttcaacaatgccaacgtgacctatctgatcgccgagtacatgaagagagtgctggacgacgacttccagaccttctaccagtggaaccgcaactaccggtacatggacatgcttaagggcgagtacgacagaaagggctccctgcagcactgcttcaccagcgtggaagagagagaaggcctctggaaagagcgggcctccagaacagagcggtacagaaagcaggccagcaacaagatccgcagcaaccggcagatgagaaacgccagcagcgaagagatcgagacaatcctggataagcggctgagcaacagccggaacgagtaccagaaaagcgagaaagtgatccggcgctacagagtgcaggatgccctgctgtttctgctggccaaaaagaccctgaccgaactggccgatttcgacggcgagaggttcaaactgaaagaaatcatgcccgacgccgagaagggaatcctgagcgagatcatgcccatgagcttcaccttcgagaaaggcggcaagaagtacaccatcaccagcgagggcatgaagctgaagaactacggcgacttctttgtgctggctagcgacaagaggatcggcaacctgctggaactcgtgggcagcgacatcgtgtccaaagaggatatcatggaagagttcaacaaatacgaccagtgcaggcccgagatcagctccatcgtgttcaacctggaaaagtgggccttcgacacataccccgagctgtctgccagagtggaccgggaagagaaggtggacttcaagagcatcctgaaaatcctgctgaacaacaagaacatcaacaaagagcagagcgacatcctgcggaagatccggaacgccttcgatcacaacaattaccccgacaaaggcgtggtggaaatcaaggccctgcctgagatcgccatgagcatcaagaaggcctttggggagtacgccatcatgaagtagtaa

SEQ ID NO: 150 - DNA, 3450 bp, Artificial Sequence
  Chemically Synthesized
atggactacaaagaccatgacggtgattataaagatcatgacatcgattacaaggatgacgatgacaagggcggaatgagtgtgttgacgccgttgcttctgcgagggcttaccgggtctgctagaagacttccggtccccagggccaagatacatagcctcggagacccgggaggcaacatccccgctctggtggaaaaccagaagaagtactttggcacctacagcgtgatggccatgctgaacgctcagaccgtgctggaccacatccagaaggtggccgatattgagggcgagcagaacgagaacaacgagaatctgtggtttcaccccgtgatgagccacctgtacaacgccaagaacggctacgacaagcagcccgagaaaaccatgttcatcatcgagcggctgcagagctacttcccattcctgaagatcatggccgagaaccagagagagtacagcaacggcaagtacaagcagaaccgcgtggaagtgaacagcaacgacatcttcgaggtgctgaagcgcgccttcggcgtgctgaagatgtacagggacctgaccaaccactacaagacctacgaggaaaagctgaacgacggctgcgagttcctgaccagcacagagcaacctctgagcggcatgatcaacaactactacacagtggccctgcggaacatgaacgagagatacggctacaagacagaggacctggccttcatccaggacaagcggttcaagttcgtgaaggacgcctacggcaagaaaaagtcccaagtgaataccggattcttcctgagcctgcaggactacaacggcgacacacagaagaagctgcacctgagcggagtgggaatcgccctgctgatctgcctgttcctggacaagcagtacatcaacatctttctgagcaggctgcccatcttctccagctacaatgcccagagcgaggaacggcggatcatcatcagatccttcggcatcaacagcatcaagctgcccaaggaccggatccacagcgagaagtccaacaagagcgtggccatggatatgctcaacgaagtgaagcggtgccccgacgagctgttcacaacactgtctgccgagaagcagtcccggttcagaatcatcagcgacgaccacaatgaagtgctgatgaagcggagcagcgacagattcgtgcctctgctgctgcagtatatcgattacggcaagctgttcgaccacatcaggttccacgtgaacatgggcaagctgagatacctgctgaaggccgacaagacctgcatcgacggccagaccagagtcagagtgatcgagcagcccctgaacggcttcggcagactggaagaggccgagacaatgcggaagcaagagaacggcaccttcggcaacagcggcatccggatcagagacttcgagaacatgaagcgggacgacgccaatcctgccaactatccctacatcgtggacacctacacacactacatcctggaaaacaacaaggtcgagatgtttatcaacgacaaagaggacagcgccccactgctgcccgtgatcgaggatgatagatacgtggtcaagacaatccccagctgccggatgagcaccctggaaattccagccatggccttccacatgtttctgttcggcagcaagaaaaccgagaagctgatcgtggacgtgcacaaccggtacaagagactgttccaggccatgcagaaagaagaagtgaccgccgagaatatcgccagcttcggaatcgccgagagcgacctgcctcagaagatcctggatctgatcagcggcaatgcccacggcaaggatgtggacgccttcatcagactgaccgtggacgacatgctgaccgacaccgagcggagaatcaagagattcaaggacgaccggaagtccattcggagcgccgacaacaagatgggaaagagaggcttcaagcagatctccacaggcaagctggccgacttcctggccaaggacatcgtgctgtttcagcccagcgtgaacgatggcgagaacaagatcaccggcctgaactaccggatcatgcagagcgccattgccgtgtacgatagcggcgacgattacgaggccaagcagcagttcaagctgatgttcgagaaggcccggctgatcggcaagggcacaacagagcctcatccatttctgtacaaggtgttcgcccgcagcatccccgccaatgccgtcgagttctacgagcgctacctgatcgagcggaagttctacctgaccggcctgtccaacgagatcaagaaaggcaacagagtggatgtgcccttcatccggcgggaccagaacaagtggaaaacacccgccatgaagaccctgggcagaatctacagcgaggatctgcccgtggaactgcccagacagatgttcgacaatgagatcaagtcccacctgaagtccctgccacagatggaaggcatcgacttcaacaatgccaacgtgacctatctgatcgccgagtacatgaagagagtgctggacgacgacttccagaccttctaccagtggaaccgcaactaccggtacatggacatgcttaagggcgagtacgacagaaagggctccctgcagcactgcttcaccagcgtggaagagagagaaggcctctggaaagagcgggcctccagaacagagcggtacagaaagcaggccagcaacaagatccgcagcaaccggcagatgagaaacgccagcagcgaagagatcgagacaatcctggataagcggctgagcaacagccggaacgagtaccagaaaagcgagaaagtgatccggcgctacagagtgcaggatgccctgctgtttctgctggccaaaaagaccctgaccgaactggccgatttcgacggcgagaggttcaaactgaaagaaatcatgcccgacgccgagaagggaatcctgagcgagatcatgcccatgagcttcaccttcgagaaaggcggcaagaagtacaccatcaccagcgagggcatgaagctgaagaactacggcgacttctttgtgctggctagcgacaagaggatcggcaacctgctggaactcgtgggcagcgacatcgtgtccaaagaggatatcatggaagagttcaacaaatacgaccagtgcaggcccgagatcagctccatcgtgttcaacctggaaaagtgggccttcgacacataccccgagctgtctgccagagtggaccgggaagagaaggtggacttcaagagcatcctgaaaatcctgctgaacaacaagaacatcaacaaagagcagagcgacatcctgcggaagatccggaacgccttcgatcacaacaattaccccgacaaaggcgtggtggaaatcaaggccctgcctgagatcgccatgagcatcaagaaggcctttggggagtacgccatcatgaagtagtaa

SEQ ID NO: 151 - DNA, 3744 bp, Artificial Sequence
  Chemically Synthesized
atggactacaaagaccatgacggtgattataaagatcatgacatcgattacaaggatgacgatgacaagggcggaatgagtgtgttgacgccgttgcttctgcgagggcttaccgggtctgctagaagacttccggtccccagggccaagatacatagcctcggagacccgatgtctgtgctcactcctctgcttttgcgaggactgactgggtccgccagacgactcccggtgccgagagctaaaatccatagcctgggaaaattggcaactatgtcagtcctgacgccgcttcttctccggggtcttacagggtctgcaagaaggctgcctgtacctcgggcgaaaattcatagcttgggcgacccgatgagtgtattgacgcccctgttgctgagaggattgactgggtcagcgcgccggctccctgtcccccgagctaagattcactcccttggtaagctgggaggcaacatccccgctctggtggaaaaccagaagaagtactttggcacctacagcgtgatggccatgctgaacgctcagaccgtgctggaccacatccagaaggtggccgatattgagggcgagcagaacgagaacaacgagaatctgtggtttcaccccgtgatgagccacctgtacaacgccaagaacggctacgacaagcagcccgagaaaaccatgttcatcatcgagcggctgcagagctacttcccattcctgaagatcatggccgagaaccagagagagtacagcaacggcaagtacaagcagaaccgcgtggaagtgaacagcaacgacatcttcgaggtgctgaagcgcgccttcggcgtgctgaagatgtacagggacctgaccaaccactacaagacctacgaggaaaagctgaacgacggctgcgagttcctgaccagcacagagcaacctctgagcggcatgatcaacaactactacacagtggccctgcggaacatgaacgagagatacggctacaagacagaggacctggccttcatccaggacaagcggttcaagttcgtgaaggacgcctacggcaagaaaaagtcccaagtgaataccggattcttcctgagcctgcaggactacaacggcgacacacagaagaagctgcacctgagcggagtgggaatcgccctgctgatctgcctgttcctggacaagcagtacatcaacatctttctgagcaggctgcccatcttctccagctacaatgcccagagcgaggaacggcggatcatcatcagatccttcggcatcaacagcatcaagctgcccaaggaccggatccacagcgagaagtccaacaagagcgtggccatggatatgctcaacgaagtgaagcggtgccccgacgagctgttcacaacactgtctgccgagaagcagtcccggttcagaatcatcagcgacgaccacaatgaagtgctgatgaagcggagcagcgacagattcgtgcctctgctgctgcagtatatcgattacggcaagctgttcgaccacatcaggttccacgtgaacatgggcaagctgagatacctgctgaaggccgacaagacctgcatcgacggccagaccagagtcagagtgatcgagcagcccctgaacggcttcggcagactggaagaggccgagacaatgcggaagcaagagaacggcaccttcggcaacagcggcatccggatcagagacttcgagaacatgaagcgggacgacgccaatcctgccaactatccctacatcgtggacacctacacacactacatcctggaaaacaacaaggtcgagatgtttatcaacgacaaagaggacagcgccccactgctgcccgtgatcgaggatgatagatacgtggtcaagacaatccccagctgccggatgagcaccctggaaattccagccatggccttccacatgtttctgttcggcagcaagaaaaccgagaagctgatcgtggacgtgcacaaccggtacaagagactgttccaggccatgcagaaagaagaagtgaccgccgagaatatcgccagcttcggaatcgccgagagcgacctgcctcagaagatcctggatctgatcagcggcaatgcccacggcaaggatgtggacgccttcatcagactgaccgtggacgacatgctgaccgacaccgagcggagaatcaagagattcaaggacgaccggaagtccattcggagcgccgacaacaagatgggaaagagaggcttcaagcagatctccacaggcaagctggccgacttcctggccaaggacatcgtgctgtttcagcccagcgtgaacgatggcgagaacaagatcaccggcctgaactaccggatcatgcagagcgccattgccgtgtacgatagcggcgacgattacgaggccaagcagcagttcaagctgatgttcgagaaggcccggctgatcggcaagggcacaacagagcctcatccatttctgtacaaggtgttcgcccgcagcatccccgccaatgccgtcgagttctacgagcgctacctgatcgagcggaagttctacctgaccggcctgtccaacgagatcaagaaaggcaacagagtggatgtgcccttcatccggcgggaccagaacaagtggaaaacacccgccatgaagaccctgggcagaatctacagcgaggatctgcccgtggaactgcccagacagatgttcgacaatgagatcaagtcccacctgaagtccctgccacagatggaaggcatcgacttcaacaatgccaacgtgacctatctgatcgccgagtacatgaagagagtgctggacgacgacttccagaccttctaccagtggaaccgcaactaccggtacatggacatgcttaagggcgagtacgacagaaagggctccctgcagcactgcttcaccagcgtggaagagagagaaggcctctggaaagagcgggcctccagaacagagcggtacagaaagcaggccagcaacaagatccgcagcaaccggcagatgagaaacgccagcagcgaagagatcgagacaatcctggataagcggctgagcaacagccggaacgagtaccagaaaagcgagaaagtgatccggcgctacagagtgcaggatgccctgctgtttctgctggccaaaaagaccctgaccgaactggccgatttcgacggcgagaggttcaaactgaaagaaatcatgcccgacgccgagaagggaatcctgagcgagatcatgcccatgagcttcaccttcgagaaaggcggcaagaagtacaccatcaccagcgagggcatgaagctgaagaactacggcgacttctttgtgctggctagcgacaagaggatcggcaacctgctggaactcgtgggcagcgacatcgtgtccaaagaggatatcatggaagagttcaacaaatacgaccagtgcaggcccgagatcagctccatcgtgttcaacctggaaaagtgggccttcgacacataccccgagctgtctgccagagtggaccgggaagagaaggtggacttcaagagcatcctgaaaatcctgctgaacaacaagaacatcaacaaagagcagagcgacatcctgcggaagatccggaacgccttcgatcacaacaattaccccgacaaaggcgtggtggaaatcaaggccctgcctgagatcgccatgagcatcaagaaggcctttggggagtacgccatcatgaagtagtaa

SEQ ID NO: 152 - DNA, 3414 bp, Artificial Sequence
  Chemically Synthesized
atggactacaaagaccatgacggtgattataaagatcatgacatcgattacaaggatgacgatgacaagggcggaatgtacaggatgcaactcctgtcttgcattgcactaagtcttgcacttgtcacgaattccggaggcaacatccccgctctggtggaaaaccagaagaagtactttggcacctacagcgtgatggccatgctgaacgctcagaccgtgctggaccacatccagaaggtggccgatattgagggcgagcagaacgagaacaacgagaatctgtggtttcaccccgtgatgagccacctgtacaacgccaagaacggctacgacaagcagcccgagaaaaccatgttcatcatcgagcggctgcagagctacttcccattcctgaagatcatggccgagaaccagagagagtacagcaacggcaagtacaagcagaaccgcgtggaagtgaacagcaacgacatcttcgaggtgctgaagcgcgccttcggcgtgctgaagatgtacagggacctgaccaaccactacaagacctacgaggaaaagctgaacgacggctgcgagttcctgaccagcacagagcaacctctgagcggcatgatcaacaactactacacagtggccctgcggaacatgaacgagagatacggctacaagacagaggacctggccttcatccaggacaagcggttcaagttcgtgaaggacgcctacggcaagaaaaagtcccaagtgaataccggattcttcctgagcctgcaggactacaacggcgacacacagaagaagctgcacctgagcggagtgggaatcgccctgctgatctgcctgttcctggacaagcagtacatcaacatctttctgagcaggctgcccatcttctccagctacaatgcccagagcgaggaacggcggatcatcatcagatccttcggcatcaacagcatcaagctgcccaaggaccggatccacagcgagaagtccaacaagagcgtggccatggatatgctcaacgaagtgaagcggtgccccgacgagctgttcacaacactgtctgccgagaagcagtcccggttcagaatcatcagcgacgaccacaatgaagtgctgatgaagcggagcagcgacagattcgtgcctctgctgctgcagtatatcgattacggcaagctgttcgaccacatcaggttccacgtgaacatgggcaagctgagatacctgctgaaggccgacaagacctgcatcgacggccagaccagagtcagagtgatcgagcagcccctgaacggcttcggcagactggaagaggccgagacaatgcggaagcaagagaacggcaccttcggcaacagcggcatccggatcagagacttcgagaacatgaagcgggacgacgccaatcctgccaactatccctacatcgtggacacctacacacactacatcctggaaaacaacaaggtcgagatgtttatcaacgacaaagaggacagcgccccactgctgcccgtgatcgaggatgatagatacgtggtcaagacaatccccagctgccggatgagcaccctggaaattccagccatggccttccacatgtttctgttcggcagcaagaaaaccgagaagctgatcgtggacgtgcacaaccggtacaagagactgttccaggccatgcagaaagaagaagtgaccgccgagaatatcgccagcttcggaatcgccgagagcgacctgcctcagaagatcctggatctgatcagcggcaatgcccacggcaaggatgtggacgccttcatcagactgaccgtggacgacatgctgaccgacaccgagcggagaatcaagagattcaaggacgaccggaagtccattcggagcgccgacaacaagatgggaaagagaggcttcaagcagatctccacaggcaagctggccgacttcctggccaaggacatcgtgctgtttcagcccagcgtgaacgatggcgagaacaagatcaccggcctgaactaccggatcatgcagagcgccattgccgtgtacgatagcggcgacgattacgaggccaagcagcagttcaagctgatgttcgagaaggcccggctgatcggcaagggcacaacagagcctcatccatttctgtacaaggtgttcgcccgcagcatccccgccaatgccgtcgagttctacgagcgctacctgatcgagcggaagttctacctgaccggcctgtccaacgagatcaagaaaggcaacagagtggatgtgcccttcatccggcgggaccagaacaagtggaaaacacccgccatgaagaccctgggcagaatctacagcgaggatctgcccgtggaactgcccagacagatgttcgacaatgagatcaagtcccacctgaagtccctgccacagatggaaggcatcgacttcaacaatgccaacgtgacctatctgatcgccgagtacatgaagagagtgctggacgacgacttccagaccttctaccagtggaaccgcaactaccggtacatggacatgcttaagggcgagtacgacagaaagggctccctgcagcactgcttcaccagcgtggaagagagagaaggcctctggaaagagcgggcctccagaacagagcggtacagaaagcaggccagcaacaagatccgcagcaaccggcagatgagaaacgccagcagcgaagagatcgagacaatcctggataagcggctgagcaacagccggaacgagtaccagaaaagcgagaaagtgatccggcgctacagagtgcaggatgccctgctgtttctgctggccaaaaagaccctgaccgaactggccgatttcgacggcgagaggttcaaactgaaagaaatcatgcccgacgccgagaagggaatcctgagcgagatcatgcccatgagcttcaccttcgagaaaggcggcaagaagtacaccatcaccagcgagggcatgaagctgaagaactacggcgacttctttgtgctggctagcgacaagaggatcggcaacctgctggaactcgtgggcagcgacatcgtgtccaaagaggatatcatggaagagttcaacaaatacgaccagtgcaggcccgagatcagctccatcgtgttcaacctggaaaagtgggccttcgacacataccccgagctgtctgccagagtggaccgggaagagaaggtggacttcaagagcatcctgaaaatcctgctgaacaacaagaacatcaacaaagagcagagcgacatcctgcggaagatccggaacgccttcgatcacaacaattaccccgacaaaggcgtggtggaaatcaaggccctgcctgagatcgccatgagcatcaagaaggcctttggggagtacgccatcatgaagtagtaa

SEQ ID NO: 153 - DNA, 3483 bp, Artificial Sequence
  Chemically Synthesized
atggactacaaagaccatgacggtgattataaagatcatgacatcgattacaaggatgacgatgacaagggcggaatgggttgttgtttcagcaagacagcggcgaaaggtgaagcagcagcagaaagaccaggcgaggctgcggtagcatcaagtccctccaaggctaatgggcaggaaaacggacacgtcaaagttggaagcggaggcaacatccccgctctggtggaaaaccagaagaagtactttggcacctacagcgtgatggccatgctgaacgctcagaccgtgctggaccacatccagaaggtggccgatattgagggcgagcagaacgagaacaacgagaatctgtggtttcaccccgtgatgagccacctgtacaacgccaagaacggctacgacaagcagcccgagaaaaccatgttcatcatcgagcggctgcagagctacttcccattcctgaagatcatggccgagaaccagagagagtacagcaacggcaagtacaagcagaaccgcgtggaagtgaacagcaacgacatcttcgaggtgctgaagcgcgccttcggcgtgctgaagatgtacagggacctgaccaaccactacaagacctacgaggaaaagctgaacgacggctgcgagttcctgaccagcacagagcaacctctgagcggcatgatcaacaactactacacagtggccctgcggaacatgaacgagagatacggctacaagacagaggacctggccttcatccaggacaagcggttcaagttcgtgaaggacgcctacggcaagaaaaagtcccaagtgaataccggattcttcctgagcctgcaggactacaacggcgacacacagaagaagctgcacctgagcggagtgggaatcgccctgctgatctgcctgttcctggacaagcagtacatcaacatctttctgagcaggctgcccatcttctccagctacaatgcccagagcgaggaacggcggatcatcatcagatccttcggcatcaacagcatcaagctgcccaaggaccggatccacagcgagaagtccaacaagagcgtggccatggatatgctcaacgaagtgaagcggtgccccgacgagctgttcacaacactgtctgccgagaagcagtcccggttcagaatcatcagcgacgaccacaatgaagtgctgatgaagcggagcagcgacagattcgtgcctctgctgctgcagtatatcgattacggcaagctgttcgaccacatcaggttccacgtgaacatgggcaagctgagatacctgctgaaggccgacaagacctgcatcgacggccagaccagagtcagagtgatcgagcagcccctgaacggcttcggcagactggaagaggccgagacaatgcggaagcaagagaacggcaccttcggcaacagcggcatccggatcagagacttcgagaacatgaagcgggacgacgccaatcctgccaactatccctacatcgtggacacctacacacactacatcctggaaaacaacaaggtcgagatgtttatcaacgacaaagaggacagcgccccactgctgcccgtgatcgaggatgatagatacgtggtcaagacaatccccagctgccggatgagcaccctggaaattccagccatggccttccacatgtttctgttcggcagcaagaaaaccgagaagctgatcgtggacgtgcacaaccggtacaagagactgttccaggccatgcagaaagaagaagtgaccgccgagaatatcgccagcttcggaatcgccgagagcgacctgcctcagaagatcctggatctgatcagcggcaatgcccacggcaaggatgtggacgccttcatcagactgaccgtggacgacatgctgaccgacaccgagcggagaatcaagagattcaaggacgaccggaagtccattcggagcgccgacaacaagatgggaaagagaggcttcaagcagatctccacaggcaagctggccgacttcctggccaaggacatcgtgctgtttcagcccagcgtgaacgatggcgagaacaagatcaccggcctgaactaccggatcatgcagagcgccattgccgtgtacgatagcggcgacgattacgaggccaagcagcagttcaagctgatgttcgagaaggcccggctgatcggcaagggcacaacagagcctcatccatttctgtacaaggtgttcgcccgcagcatccccgccaatgccgtcgagttctacgagcgctacctgatcgagcggaagttctacctgaccggcctgtccaacgagatcaagaaaggcaacagagtggatgtgcccttcatccggcgggaccagaacaagtggaaaacacccgccatgaagaccctgggcagaatctacagcgaggatctgcccgtggaactgcccagacagatgttcgacaatgagatcaagtcccacctgaagtccctgccacagatggaaggcatcgacttcaacaatgccaacgtgacctatctgatcgccgagtacatgaagagagtgctggacgacgacttccagaccttctaccagtggaaccgcaactaccggtacatggacatgcttaagggcgagtacgacagaaagggctccctgcagcactgcttcaccagcgtggaagagagagaaggcctctggaaagagcgggcctccagaacagagcggtacagaaagcaggccagcaacaagatccgcagcaaccggcagatgagaaacgccagcagcgaagagatcgagacaatcctggataagcggctgagcaacagccggaacgagtaccagaaaagcgagaaagtgatccggcgctacagagtgcaggatgccctgctgtttctgctggccaaaaagaccctgaccgaactggccgatttcgacggcgagaggttcaaactgaaagaaatcatgcccgacgccgagaagggaatcctgagcgagatcatgcccatgagcttcaccttcgagaaaggcggcaagaagtacaccatcaccagcgagggcatgaagctgaagaactacggcgacttctttgtgctggctagcgacaagaggatcggcaacctgctggaactcgtgggcagcgacatcgtgtccaaagaggatatcatggaagagttcaacaaatacgaccagtgcaggcccgagatcagctccatcgtgttcaacctggaaaagtgggccttcgacacataccccgagctgtctgccagagtggaccgggaagagaaggtggacttcaagagcatcctgaaaatcctgctgaacaacaagaacatcaacaaagagcagagcgacatcctgcggaagatccggaacgccttcgatcacaacaattaccccgacaaaggcgtggtggaaatcaaggccctgcctgagatcgccatgagcatcaagaaggcctttggggagtacgccatcatgaagtagtaa

SEQ ID NO: 154 - DNA, 3405 bp, Artificial Sequence
  Chemically Synthesized
atggactacaaagaccatgacggtgattataaagatcatgacatcgattacaaggatgacgatgacaagggcggaatgctgctgcccgtccccctgctgctgggcctgctgggcgccgccgccgacggaggcaacatccccgctctggtggaaaaccagaagaagtactttggcacctacagcgtgatggccatgctgaacgctcagaccgtgctggaccacatccagaaggtggccgatattgagggcgagcagaacgagaacaacgagaatctgtggtttcaccccgtgatgagccacctgtacaacgccaagaacggctacgacaagcagcccgagaaaaccatgttcatcatcgagcggctgcagagctacttcccattcctgaagatcatggccgagaaccagagagagtacagcaacggcaagtacaagcagaaccgcgtggaagtgaacagcaacgacatcttcgaggtgctgaagcgcgccttcggcgtgctgaagatgtacagggacctgaccaaccactacaagacctacgaggaaaagctgaacgacggctgcgagttcctgaccagcacagagcaacctctgagcggcatgatcaacaactactacacagtggccctgcggaacatgaacgagagatacggctacaagacagaggacctggccttcatccaggacaagcggttcaagttcgtgaaggacgcctacggcaagaaaaagtcccaagtgaataccggattcttcctgagcctgcaggactacaacggcgacacacagaagaagctgcacctgagcggagtgggaatcgccctgctgatctgcctgttcctggacaagcagtacatcaacatctttctgagcaggctgcccatcttctccagctacaatgcccagagcgaggaacggcggatcatcatcagatccttcggcatcaacagcatcaagctgcccaaggaccggatccacagcgagaagtccaacaagagcgtggccatggatatgctcaacgaagtgaagcggtgccccgacgagctgttcacaacactgtctgccgagaagcagtcccggttcagaatcatcagcgacgaccacaatgaagtgctgatgaagcggagcagcgacagattcgtgcctctgctgctgcagtatatcgattacggcaagctgttcgaccacatcaggttccacgtgaacatgggcaagctgagatacctgctgaaggccgacaagacctgcatcgacggccagaccagagtcagagtgatcgagcagcccctgaacggcttcggcagactggaagaggccgagacaatgcggaagcaagagaacggcaccttcggcaacagcggcatccggatcagagacttcgagaacatgaagcgggacgacgccaatcctgccaactatccctacatcgtggacacctacacacactacatcctggaaaacaacaaggtcgagatgtttatcaacgacaaagaggacagcgccccactgctgcccgtgatcgaggatgatagatacgtggtcaagacaatccccagctgccggatgagcaccctggaaattccagccatggccttccacatgtttctgttcggcagcaagaaaaccgagaagctgatcgtggacgtgcacaaccggtacaagagactgttccaggccatgcagaaagaagaagtgaccgccgagaatatcgccagcttcggaatcgccgagagcgacctgcctcagaagatcctggatctgatcagcggcaatgcccacggcaaggatgtggacgccttcatcagactgaccgtggacgacatgctgaccgacaccgagcggagaatcaagagattcaaggacgaccggaagtccattcggagcgccgacaacaagatgggaaagagaggcttcaagcagatctccacaggcaagctggccgacttcctggccaaggacatcgtgctgtttcagcccagcgtgaacgatggcgagaacaagatcaccggcctgaactaccggatcatgcagagcgccattgccgtgtacgatagcggcgacgattacgaggccaagcagcagttcaagctgatgttcgagaaggcccggctgatcggcaagggcacaacagagcctcatccatttctgtacaaggtgttcgcccgcagcatccccgccaatgccgtcgagttctacgagcgctacctgatcgagcggaagttctacctgaccggcctgtccaacgagatcaagaaaggcaacagagtggatgtgcccttcatccggcgggaccagaacaagtggaaaacacccgccatgaagaccctgggcagaatctacagcgaggatctgcccgtggaactgcccagacagatgttcgacaatgagatcaagtcccacctgaagtccctgccacagatggaaggcatcgacttcaacaatgccaacgtgacctatctgatcgccgagtacatgaagagagtgctggacgacgacttccagaccttctaccagtggaaccgcaactaccggtacatggacatgcttaagggcgagtacgacagaaagggctccctgcagcactgcttcaccagcgtggaagagagagaaggcctctggaaagagcgggcctccagaacagagcggtacagaaagcaggccagcaacaagatccgcagcaaccggcagatgagaaacgccagcagcgaagagatcgagacaatcctggataagcggctgagcaacagccggaacgagtaccagaaaagcgagaaagtgatccggcgctacagagtgcaggatgccctgctgtttctgctggccaaaaagaccctgaccgaactggccgatttcgacggcgagaggttcaaactgaaagaaatcatgcccgacgccgagaagggaatcctgagcgagatcatgcccatgagcttcaccttcgagaaaggcggcaagaagtacaccatcaccagcgagggcatgaagctgaagaactacggcgacttctttgtgctggctagcgacaagaggatcggcaacctgctggaactcgtgggcagcgacatcgtgtccaaagaggatatcatggaagagttcaacaaatacgaccagtgcaggcccgagatcagctccatcgtgttcaacctggaaaagtgggccttcgacacataccccgagctgtctgccagagtggaccgggaagagaaggtggacttcaagagcatcctgaaaatcctgctgaacaacaagaacatcaacaaagagcagagcgacatcctgcggaagatccggaacgccttcgatcacaacaattaccccgacaaaggcgtggtggaaatcaaggccctgcctgagatcgccatgagcatcaagaaggcctttggggagtacgccatcatgaagtagtaa

SEQ ID NO: 155 - DNA, 3384 bp, Artificial Sequence
  Chemically Synthesized
atggactacaaagaccatgacggtgattataaagatcatgacatcgattacaaggatgacgatgacaagggcggagggatcactctcggcaaggacgagctgtaaggaggcaacatccccgctctggtggaaaaccagaagaagtactttggcacctacagcgtgatggccatgctgaacgctcagaccgtgctggaccacatccagaaggtggccgatattgagggcgagcagaacgagaacaacgagaatctgtggtttcaccccgtgatgagccacctgtacaacgccaagaacggctacgacaagcagcccgagaaaaccatgttcatcatcgagcggctgcagagctacttcccattcctgaagatcatggccgagaaccagagagagtacagcaacggcaagtacaagcagaaccgcgtggaagtgaacagcaacgacatcttcgaggtgctgaagcgcgccttcggcgtgctgaagatgtacagggacctgaccaaccactacaagacctacgaggaaaagctgaacgacggctgcgagttcctgaccagcacagagcaacctctgagcggcatgatcaacaactactacacagtggccctgcggaacatgaacgagagatacggctacaagacagaggacctggccttcatccaggacaagcggttcaagttcgtgaaggacgcctacggcaagaaaaagtcccaagtgaataccggattcttcctgagcctgcaggactacaacggcgacacacagaagaagctgcacctgagcggagtgggaatcgccctgctgatctgcctgttcctggacaagcagtacatcaacatctttctgagcaggctgcccatcttctccagctacaatgcccagagcgaggaacggcggatcatcatcagatccttcggcatcaacagcatcaagctgcccaaggaccggatccacagcgagaagtccaacaagagcgtggccatggatatgctcaacgaagtgaagcggtgccccgacgagctgttcacaacactgtctgccgagaagcagtcccggttcagaatcatcagcgacgaccacaatgaagtgctgatgaagcggagcagcgacagattcgtgcctctgctgctgcagtatatcgattacggcaagctgttcgaccacatcaggttccacgtgaacatgggcaagctgagatacctgctgaaggccgacaagacctgcatcgacggccagaccagagtcagagtgatcgagcagcccctgaacggcttcggcagactggaagaggccgagacaatgcggaagcaagagaacggcaccttcggcaacagcggcatccggatcagagacttcgagaacatgaagcgggacgacgccaatcctgccaactatccctacatcgtggacacctacacacactacatcctggaaaacaacaaggtcgagatgtttatcaacgacaaagaggacagcgccccactgctgcccgtgatcgaggatgatagatacgtggtcaagacaatccccagctgccggatgagcaccctggaaattccagccatggccttccacatgtttctgttcggcagcaagaaaaccgagaagctgatcgtggacgtgcacaaccggtacaagagactgttccaggccatgcagaaagaagaagtgaccgccgagaatatcgccagcttcggaatcgccgagagcgacctgcctcagaagatcctggatctgatcagcggcaatgcccacggcaaggatgtggacgccttcatcagactgaccgtggacgacatgctgaccgacaccgagcggagaatcaagagattcaaggacgaccggaagtccattcggagcgccgacaacaagatgggaaagagaggcttcaagcagatctccacaggcaagctggccgacttcctggccaaggacatcgtgctgtttcagcccagcgtgaacgatggcgagaacaagatcaccggcctgaactaccggatcatgcagagcgccattgccgtgtacgatagcggcgacgattacgaggccaagcagcagttcaagctgatgttcgagaaggcccggctgatcggcaagggcacaacagagcctcatccatttctgtacaaggtgttcgcccgcagcatccccgccaatgccgtcgagttctacgagcgctacctgatcgagcggaagttctacctgaccggcctgtccaacgagatcaagaaaggcaacagagtggatgtgcccttcatccggcgggaccagaacaagtggaaaacacccgccatgaagaccctgggcagaatctacagcgaggatctgcccgtggaactgcccagacagatgttcgacaatgagatcaagtcccacctgaagtccctgccacagatggaaggcatcgacttcaacaatgccaacgtgacctatctgatcgccgagtacatgaagagagtgctggacgacgacttccagaccttctaccagtggaaccgcaactaccggtacatggacatgcttaagggcgagtacgacagaaagggctccctgcagcactgcttcaccagcgtggaagagagagaaggcctctggaaagagcgggcctccagaacagagcggtacagaaagcaggccagcaacaagatccgcagcaaccggcagatgagaaacgccagcagcgaagagatcgagacaatcctggataagcggctgagcaacagccggaacgagtaccagaaaagcgagaaagtgatccggcgctacagagtgcaggatgccctgctgtttctgctggccaaaaagaccctgaccgaactggccgatttcgacggcgagaggttcaaactgaaagaaatcatgcccgacgccgagaagggaatcctgagcgagatcatgcccatgagcttcaccttcgagaaaggcggcaagaagtacaccatcaccagcgagggcatgaagctgaagaactacggcgacttctttgtgctggctagcgacaagaggatcggcaacctgctggaactcgtgggcagcgacatcgtgtccaaagaggatatcatggaagagttcaacaaatacgaccagtgcaggcccgagatcagctccatcgtgttcaacctggaaaagtgggccttcgacacataccccgagctgtctgccagagtggaccgggaagagaaggtggacttcaagagcatcctgaaaatcctgctgaacaacaagaacatcaacaaagagcagagcgacatcctgcggaagatccggaacgccttcgatcacaacaattaccccgacaaaggcgtggtggaaatcaaggccctgcctgagatcgccatgagcatcaagaaggcctttggggagtacgccatcatgaagtagtaa

SEQ ID NO: 156 - DNA, 3366 bp, Artificial Sequence
  Chemically Synthesized
atggactacaaagaccatgacggtgattataaagatcatgacatcgattacaaggatgacgatgacaagggcggatccaaattataaggaggcaacatccccgctctggtggaaaaccagaagaagtactttggcacctacagcgtgatggccatgctgaacgctcagaccgtgctggaccacatccagaaggtggccgatattgagggcgagcagaacgagaacaacgagaatctgtggtttcaccccgtgatgagccacctgtacaacgccaagaacggctacgacaagcagcccgagaaaaccatgttcatcatcgagcggctgcagagctacttcccattcctgaagatcatggccgagaaccagagagagtacagcaacggcaagtacaagcagaaccgcgtggaagtgaacagcaacgacatcttcgaggtgctgaagcgcgccttcggcgtgctgaagatgtacagggacctgaccaaccactacaagacctacgaggaaaagctgaacgacggctgcgagttcctgaccagcacagagcaacctctgagcggcatgatcaacaactactacacagtggccctgcggaacatgaacgagagatacggctacaagacagaggacctggccttcatccaggacaagcggttcaagttcgtgaaggacgcctacggcaagaaaaagtcccaagtgaataccggattcttcctgagcctgcaggactacaacggcgacacacagaagaagctgcacctgagcggagtgggaatcgccctgctgatctgcctgttcctggacaagcagtacatcaacatctttctgagcaggctgcccatcttctccagctacaatgcccagagcgaggaacggcggatcatcatcagatccttcggcatcaacagcatcaagctgcccaaggaccggatccacagcgagaagtccaacaagagcgtggccatggatatgctcaacgaagtgaagcggtgccccgacgagctgttcacaacactgtctgccgagaagcagtcccggttcagaatcatcagcgacgaccacaatgaagtgctgatgaagcggagcagcgacagattcgtgcctctgctgctgcagtatatcgattacggcaagctgttcgaccacatcaggttccacgtgaacatgggcaagctgagatacctgctgaaggccgacaagacctgcatcgacggccagaccagagtcagagtgatcgagcagcccctgaacggcttcggcagactggaagaggccgagacaatgcggaagcaagagaacggcaccttcggcaacagcggcatccggatcagagacttcgagaacatgaagcgggacgacgccaatcctgccaactatccctacatcgtggacacctacacacactacatcctggaaaacaacaaggtcgagatgtttatcaacgacaaagaggacagcgccccactgctgcccgtgatcgaggatgatagatacgtggtcaagacaatccccagctgccggatgagcaccctggaaattccagccatggccttccacatgtttctgttcggcagcaagaaaaccgagaagctgatcgtggacgtgcacaaccggtacaagagactgttccaggccatgcagaaagaagaagtgaccgccgagaatatcgccagcttcggaatcgccgagagcgacctgcctcagaagatcctggatctgatcagcggcaatgcccacggcaaggatgtggacgccttcatcagactgaccgtggacgacatgctgaccgacaccgagcggagaatcaagagattcaaggacgaccggaagtccattcggagcgccgacaacaagatgggaaagagaggcttcaagcagatctccacaggcaagctggccgacttcctggccaaggacatcgtgctgtttcagcccagcgtgaacgatggcgagaacaagatcaccggcctgaactaccggatcatgcagagcgccattgccgtgtacgatagcggcgacgattacgaggccaagcagcagttcaagctgatgttcgagaaggcccggctgatcggcaagggcacaacagagcctcatccatttctgtacaaggtgttcgcccgcagcatccccgccaatgccgtcgagttctacgagcgctacctgatcgagcggaagttctacctgaccggcctgtccaacgagatcaagaaaggcaacagagtggatgtgcccttcatccggcgggaccagaacaagtggaaaacacccgccatgaagaccctgggcagaatctacagcgaggatctgcccgtggaactgcccagacagatgttcgacaatgagatcaagtcccacctgaagtccctgccacagatggaaggcatcgacttcaacaatgccaacgtgacctatctgatcgccgagtacatgaagagagtgctggacgacgacttccagaccttctaccagtggaaccgcaactaccggtacatggacatgcttaagggcgagtacgacagaaagggctccctgcagcactgcttcaccagcgtggaagagagagaaggcctctggaaagagcgggcctccagaacagagcggtacagaaagcaggccagcaacaagatccgcagcaaccggcagatgagaaacgccagcagcgaagagatcgagacaatcctggataagcggctgagcaacagccggaacgagtaccagaaaagcgagaaagtgatccggcgctacagagtgcaggatgccctgctgtttctgctggccaaaaagaccctgaccgaactggccgatttcgacggcgagaggttcaaactgaaagaaatcatgcccgacgccgagaagggaatcctgagcgagatcatgcccatgagcttcaccttcgagaaaggcggcaagaagtacaccatcaccagcgagggcatgaagctgaagaactacggcgacttctttgtgctggctagcgacaagaggatcggcaacctgctggaactcgtgggcagcgacatcgtgtccaaagaggatatcatggaagagttcaacaaatacgaccagtgcaggcccgagatcagctccatcgtgttcaacctggaaaagtgggccttcgacacataccccgagctgtctgccagagtggaccgggaagagaaggtggacttcaagagcatcctgaaaatcctgctgaacaacaagaacatcaacaaagagcagagcgacatcctgcggaagatccggaacgccttcgatcacaacaattaccccgacaaaggcgtggtggaaatcaaggccctgcctgagatcgccatgagcatcaagaaggcctttggggagtacgccatcatgaagtagtaa

SEQ ID NO: 157 - DNA, 3150 bp, Artificial Sequence
  Chemically Synthesized
atggactacaaagaccatgacggtgattataaagatcatgacatcgattacaaggatgacgatgacaagggcggaaactcaaagaaaaggtcactggaggacaacgaaacggaaatcaaagtctccagagacacctggaacactaagaacatgcggtccctggaaccgccacgaagcaagaaacggatacatggaggcaacatccccgctctggtggaaaaccagaagaagtactttggcacctacagcgtgatggccatgctgaacgctcagaccgtgctggaccacatccagaaggtggccgatattgagggcgagcagaacgagaacaacgagaatctgtggtttcaccccgtgatgagccacctgtacaacgccaagaacggctacgacaagcagcccgagaaaaccatgttcatcatcgagcggctgcagagctacttcccattcctgaagatcatggccgagaaccagagagagtacagcaacggcaagtacaagcagaaccgcgtggaagtgaacagcaacgacatcttcgaggtgctgaagcgcgccttcggcgtgctgaagatgtacagggacctgaccaaccactacaagacctacgaggaaaagctgaacgacggctgcgagttcctgaccagcacagagcaacctctgagcggcatgatcaacaactactacacagtggccctgcggaacatgaacgagagatacggctacaagacagaggacctggccttcatccaggacaagcggttcaagttcgtgaaggacgcctacggcaagaaaaagtcccaagtgaataccggattcttcctgagcctgcaggactacaacggcgacacacagaagaagctgcacctgagcggagtgggaatcgccctgctgatctgcctgttcctggacaagcagtacatcaacatctttctgagcaggctgcccatcttctccagctacaatgcccagagcgaggaacggcggatcatcatcagatccttcggcatcaacagcatcaagctgcccaaggaccggatccacagcgagaagtccaacaagagcgtggccatggatatgctcaacgaagtgaagcggtgccccgacgagctgttcacaacactgtctgccgagaagcagtcccggttcagaatcatcagcgacgaccacaatgaagtgctgatgaagcggagcagcgacagattcgtgcctctgctgctgcagtatatcgattacggcaagctgttcgaccacatcaggttccacgtgaacatgggcaagctgagatacctgctgaaggccgacaagacctgcatcgacggccagaccagagtcagagtgatcgagcagcccctgaacggcttcggcagactggaagaggccgagacaatgcggaagcaagagaacggcaccttcggcaacagcggcatccggatcagagacttcgagaacatgaagcgggacgacgccaatcctgccaactatccctacatcgtggacacctacacacactacatcctggaaaacaacaaggtcgagatgtttatcaacgacaaagaggacagcgccccactgctgcccgtgatcgaggatgatagatacgtggtcaagacaatccccagctgccggatgagcaccctggaaattccagccatggccttccacatgtttctgttcggcagcaagaaaaccgagaagctgatcgtggacgtgcacaaccggtacaagagactgttccaggccatgcagaaagaagaagtgaccgccgagaatatcgccagcttcggaatcgccgagagcgacctgcctcagaagatcctggatctgatcagcggcaatgcccacggcaaggatgtggacgccttcatcagactgaccgtggacgacatgctgaccgacaccgagcggagaatcaagagattcaaggacgaccggaagtccattcggagcgccgacaacaagatgggaaagagaggcttcaagcagatctccacaggcaagctggccgacttcctggccaaggacatcgtgctgtttcagcccagcgtgaacgatggcgagaacaagatcaccggcctgaactaccggatcatgcagagcgccattgccgtgtacgatagcggcgacgattacgaggccaagcagcagttcaagctgatgttcgagaaggcccggctgatcggcaagggcacaacagagcctcatccatttctgtacaaggtgttcgcccgcagcatccccgccaatgccgtcgagttctacgagcgctacctgatcgagcggaagttctacctgaccggcctgtccaacgagatcaagaaaggcaacagagtggatgtgcccttcatccggcgggaccagaacaagtggaaaacacccgccatgaagaccctgggcagaatctacagcgaggatctgcccgtggaactgcccagacagatgttcgacaatgagatcaagtcccacctgaagtccctgccacagatggaaggcatcgacttcaacaatgccaacgtgacctatctgatcgccgagtacatgaagagagtgctggacgacgacttccagaccttctaccagtggaaccgcaactaccggtacatggacatgcttaagggcgagtacgacagaaagggctccctgcagcactgcttcaccagcgtggaagagagagaaggcctctggaaagagcgggcctccagaacagagcggtacagaaagcaggccagcaacaagatccgcagcaaccggcagatgagaaacgccagcagcgaagagatcgagacaatcctggataagcggctgagcaacagccggaacgagtaccagaaaagcgagaaagtgatccggcgctacagagtgcaggatgccctgctgtttctgctggccaaaaagaccctgaccgaactggccgatttcgacggcgagaggttcaaactgaaagaaatcatgcccgacgccgagaagggaatcctgagcgagatcatgcccatgagcttcaccttcgagaaaggcggcaagaagtacaccatcaccagcgagggcatgaagctgaagaactacggcgacttctttgtgctggctagcgacaagaggatcggcaacctgctggaactcgtgggcagcgacatcgtgtccaaagaggattagtaa

SEQ ID NO: 158 - DNA, 3066 bp, Artificial Sequence
  Chemically Synthesized
atggactacaaagaccatgacggtgattataaagatcatgacatcgattacaaggatgacgatgacaagggcggacttcaactgcctccacttgaaagactgacactgggaggcaacatccccgctctggtggaaaaccagaagaagtactttggcacctacagcgtgatggccatgctgaacgctcagaccgtgctggaccacatccagaaggtggccgatattgagggcgagcagaacgagaacaacgagaatctgtggtttcaccccgtgatgagccacctgtacaacgccaagaacggctacgacaagcagcccgagaaaaccatgttcatcatcgagcggctgcagagctacttcccattcctgaagatcatggccgagaaccagagagagtacagcaacggcaagtacaagcagaaccgcgtggaagtgaacagcaacgacatcttcgaggtgctgaagcgcgccttcggcgtgctgaagatgtacagggacctgaccaaccactacaagacctacgaggaaaagctgaacgacggctgcgagttcctgaccagcacagagcaacctctgagcggcatgatcaacaactactacacagtggccctgcggaacatgaacgagagatacggctacaagacagaggacctggccttcatccaggacaagcggttcaagttcgtgaaggacgcctacggcaagaaaaagtcccaagtgaataccggattcttcctgagcctgcaggactacaacggcgacacacagaagaagctgcacctgagcggagtgggaatcgccctgctgatctgcctgttcctggacaagcagtacatcaacatctttctgagcaggctgcccatcttctccagctacaatgcccagagcgaggaacggcggatcatcatcagatccttcggcatcaacagcatcaagctgcccaaggaccggatccacagcgagaagtccaacaagagcgtggccatggatatgctcaacgaagtgaagcggtgccccgacgagctgttcacaacactgtctgccgagaagcagtcccggttcagaatcatcagcgacgaccacaatgaagtgctgatgaagcggagcagcgacagattcgtgcctctgctgctgcagtatatcgattacggcaagctgttcgaccacatcaggttccacgtgaacatgggcaagctgagatacctgctgaaggccgacaagacctgcatcgacggccagaccagagtcagagtgatcgagcagcccctgaacggcttcggcagactggaagaggccgagacaatgcggaagcaagagaacggcaccttcggcaacagcggcatccggatcagagacttcgagaacatgaagcgggacgacgccaatcctgccaactatccctacatcgtggacacctacacacactacatcctggaaaacaacaaggtcgagatgtttatcaacgacaaagaggacagcgccccactgctgcccgtgatcgaggatgatagatacgtggtcaagacaatccccagctgccggatgagcaccctggaaattccagccatggccttccacatgtttctgttcggcagcaagaaaaccgagaagctgatcgtggacgtgcacaaccggtacaagagactgttccaggccatgcagaaagaagaagtgaccgccgagaatatcgccagcttcggaatcgccgagagcgacctgcctcagaagatcctggatctgatcagcggcaatgcccacggcaaggatgtggacgccttcatcagactgaccgtggacgacatgctgaccgacaccgagcggagaatcaagagattcaaggacgaccggaagtccattcggagcgccgacaacaagatgggaaagagaggcttcaagcagatctccacaggcaagctggccgacttcctggccaaggacatcgtgctgtttcagcccagcgtgaacgatggcgagaacaagatcaccggcctgaactaccggatcatgcagagcgccattgccgtgtacgatagcggcgacgattacgaggccaagcagcagttcaagctgatgttcgagaaggcccggctgatcggcaagggcacaacagagcctcatccatttctgtacaaggtgttcgcccgcagcatccccgccaatgccgtcgagttctacgagcgctacctgatcgagcggaagttctacctgaccggcctgtccaacgagatcaagaaaggcaacagagtggatgtgcccttcatccggcgggaccagaacaagtggaaaacacccgccatgaagaccctgggcagaatctacagcgaggatctgcccgtggaactgcccagacagatgttcgacaatgagatcaagtcccacctgaagtccctgccacagatggaaggcatcgacttcaacaatgccaacgtgacctatctgatcgccgagtacatgaagagagtgctggacgacgacttccagaccttctaccagtggaaccgcaactaccggtacatggacatgcttaagggcgagtacgacagaaagggctccctgcagcactgcttcaccagcgtggaagagagagaaggcctctggaaagagcgggcctccagaacagagcggtacagaaagcaggccagcaacaagatccgcagcaaccggcagatgagaaacgccagcagcgaagagatcgagacaatcctggataagcggctgagcaacagccggaacgagtaccagaaaagcgagaaagtgatccggcgctacagagtgcaggatgccctgctgtttctgctggccaaaaagaccctgaccgaactggccgatttcgacggcgagaggttcaaactgaaagaaatcatgcccgacgccgagaagggaatcctgagcgagatcatgcccatgagcttcaccttcgagaaaggcggcaagaagtacaccatcaccagcgagggcatgaagctgaagaactacggcgacttctttgtgctggctagcgacaagaggatcggcaacctgctggaactcgtgggcagcgacatcgtgtccaaagaggattagtaa

SEQ ID NO: 159 - DNA, 3081 bp, Artificial Sequence
  Chemically Synthesized
atggactacaaagaccatgacggtgattataaagatcatgacatcgattacaaggatgacgatgacaagggcggaggatcccttcaactgcctccacttgaaagactgacactgggtagttccggaggcaacatccccgctctggtggaaaaccagaagaagtactttggcacctacagcgtgatggccatgctgaacgctcagaccgtgctggaccacatccagaaggtggccgatattgagggcgagcagaacgagaacaacgagaatctgtggtttcaccccgtgatgagccacctgtacaacgccaagaacggctacgacaagcagcccgagaaaaccatgttcatcatcgagcggctgcagagctacttcccattcctgaagatcatggccgagaaccagagagagtacagcaacggcaagtacaagcagaaccgcgtggaagtgaacagcaacgacatcttcgaggtgctgaagcgcgccttcggcgtgctgaagatgtacagggacctgaccaaccactacaagacctacgaggaaaagctgaacgacggctgcgagttcctgaccagcacagagcaacctctgagcggcatgatcaacaactactacacagtggccctgcggaacatgaacgagagatacggctacaagacagaggacctggccttcatccaggacaagcggttcaagttcgtgaaggacgcctacggcaagaaaaagtcccaagtgaataccggattcttcctgagcctgcaggactacaacggcgacacacagaagaagctgcacctgagcggagtgggaatcgccctgctgatctgcctgttcctggacaagcagtacatcaacatctttctgagcaggctgcccatcttctccagctacaatgcccagagcgaggaacggcggatcatcatcagatccttcggcatcaacagcatcaagctgcccaaggaccggatccacagcgagaagtccaacaagagcgtggccatggatatgctcaacgaagtgaagcggtgccccgacgagctgttcacaacactgtctgccgagaagcagtcccggttcagaatcatcagcgacgaccacaatgaagtgctgatgaagcggagcagcgacagattcgtgcctctgctgctgcagtatatcgattacggcaagctgttcgaccacatcaggttccacgtgaacatgggcaagctgagatacctgctgaaggccgacaagacctgcatcgacggccagaccagagtcagagtgatcgagcagcccctgaacggcttcggcagactggaagaggccgagacaatgcggaagcaagagaacggcaccttcggcaacagcggcatccggatcagagacttcgagaacatgaagcgggacgacgccaatcctgccaactatccctacatcgtggacacctacacacactacatcctggaaaacaacaaggtcgagatgtttatcaacgacaaagaggacagcgccccactgctgcccgtgatcgaggatgatagatacgtggtcaagacaatccccagctgccggatgagcaccctggaaattccagccatggccttccacatgtttctgttcggcagcaagaaaaccgagaagctgatcgtggacgtgcacaaccggtacaagagactgttccaggccatgcagaaagaagaagtgaccgccgagaatatcgccagcttcggaatcgccgagagcgacctgcctcagaagatcctggatctgatcagcggcaatgcccacggcaaggatgtggacgccttcatcagactgaccgtggacgacatgctgaccgacaccgagcggagaatcaagagattcaaggacgaccggaagtccattcggagcgccgacaacaagatgggaaagagaggcttcaagcagatctccacaggcaagctggccgacttcctggccaaggacatcgtgctgtttcagcccagcgtgaacgatggcgagaacaagatcaccggcctgaactaccggatcatgcagagcgccattgccgtgtacgatagcggcgacgattacgaggccaagcagcagttcaagctgatgttcgagaaggcccggctgatcggcaagggcacaacagagcctcatccatttctgtacaaggtgttcgcccgcagcatccccgccaatgccgtcgagttctacgagcgctacctgatcgagcggaagttctacctgaccggcctgtccaacgagatcaagaaaggcaacagagtggatgtgcccttcatccggcgggaccagaacaagtggaaaacacccgccatgaagaccctgggcagaatctacagcgaggatctgcccgtggaactgcccagacagatgttcgacaatgagatcaagtcccacctgaagtccctgccacagatggaaggcatcgacttcaacaatgccaacgtgacctatctgatcgccgagtacatgaagagagtgctggacgacgacttccagaccttctaccagtggaaccgcaactaccggtacatggacatgcttaagggcgagtacgacagaaagggctccctgcagcactgcttcaccagcgtggaagagagagaaggcctctggaaagagcgggcctccagaacagagcggtacagaaagcaggccagcaacaagatccgcagcaaccggcagatgagaaacgccagcagcgaagagatcgagacaatcctggataagcggctgagcaacagccggaacgagtaccagaaaagcgagaaagtgatccggcgctacagagtgcaggatgccctgctgtttctgctggccaaaaagaccctgaccgaactggccgatttcgacggcgagaggttcaaactgaaagaaatcatgcccgacgccgagaagggaatcctgagcgagatcatgcccatgagcttcaccttcgagaaaggcggcaagaagtacaccatcaccagcgagggcatgaagctgaagaactacggcgacttctttgtgctggctagcgacaagaggatcggcaacctgctggaactcgtgggcagcgacatcgtgtccaaagaggattagtaa

SEQ ID NO: 160 - DNA, 3129 bp, Artificial Sequence
  Chemically Synthesized
atggactacaaagaccatgacggtgattataaagatcatgacatcgattacaaggatgacgatgacaagggcggaatgagtgtgttgacgccgttgcttctgcgagggcttaccgggtctgctagaagacttccggtccccagggccaagatacatagcctcggagacccgggaggcaacatccccgctctggtggaaaaccagaagaagtactttggcacctacagcgtgatggccatgctgaacgctcagaccgtgctggaccacatccagaaggtggccgatattgagggcgagcagaacgagaacaacgagaatctgtggtttcaccccgtgatgagccacctgtacaacgccaagaacggctacgacaagcagcccgagaaaaccatgttcatcatcgagcggctgcagagctacttcccattcctgaagatcatggccgagaaccagagagagtacagcaacggcaagtacaagcagaaccgcgtggaagtgaacagcaacgacatcttcgaggtgctgaagcgcgccttcggcgtgctgaagatgtacagggacctgaccaaccactacaagacctacgaggaaaagctgaacgacggctgcgagttcctgaccagcacagagcaacctctgagcggcatgatcaacaactactacacagtggccctgcggaacatgaacgagagatacggctacaagacagaggacctggccttcatccaggacaagcggttcaagttcgtgaaggacgcctacggcaagaaaaagtcccaagtgaataccggattcttcctgagcctgcaggactacaacggcgacacacagaagaagctgcacctgagcggagtgggaatcgccctgctgatctgcctgttcctggacaagcagtacatcaacatctttctgagcaggctgcccatcttctccagctacaatgcccagagcgaggaacggcggatcatcatcagatccttcggcatcaacagcatcaagctgcccaaggaccggatccacagcgagaagtccaacaagagcgtggccatggatatgctcaacgaagtgaagcggtgccccgacgagctgttcacaacactgtctgccgagaagcagtcccggttcagaatcatcagcgacgaccacaatgaagtgctgatgaagcggagcagcgacagattcgtgcctctgctgctgcagtatatcgattacggcaagctgttcgaccacatcaggttccacgtgaacatgggcaagctgagatacctgctgaaggccgacaagacctgcatcgacggccagaccagagtcagagtgatcgagcagcccctgaacggcttcggcagactggaagaggccgagacaatgcggaagcaagagaacggcaccttcggcaacagcggcatccggatcagagacttcgagaacatgaagcgggacgacgccaatcctgccaactatccctacatcgtggacacctacacacactacatcctggaaaacaacaaggtcgagatgtttatcaacgacaaagaggacagcgccccactgctgcccgtgatcgaggatgatagatacgtggtcaagacaatccccagctgccggatgagcaccctggaaattccagccatggccttccacatgtttctgttcggcagcaagaaaaccgagaagctgatcgtggacgtgcacaaccggtacaagagactgttccaggccatgcagaaagaagaagtgaccgccgagaatatcgccagcttcggaatcgccgagagcgacctgcctcagaagatcctggatctgatcagcggcaatgcccacggcaaggatgtggacgccttcatcagactgaccgtggacgacatgctgaccgacaccgagcggagaatcaagagattcaaggacgaccggaagtccattcggagcgccgacaacaagatgggaaagagaggcttcaagcagatctccacaggcaagctggccgacttcctggccaaggacatcgtgctgtttcagcccagcgtgaacgatggcgagaacaagatcaccggcctgaactaccggatcatgcagagcgccattgccgtgtacgatagcggcgacgattacgaggccaagcagcagttcaagctgatgttcgagaaggcccggctgatcggcaagggcacaacagagcctcatccatttctgtacaaggtgttcgcccgcagcatccccgccaatgccgtcgagttctacgagcgctacctgatcgagcggaagttctacctgaccggcctgtccaacgagatcaagaaaggcaacagagtggatgtgcccttcatccggcgggaccagaacaagtggaaaacacccgccatgaagaccctgggcagaatctacagcgaggatctgcccgtggaactgcccagacagatgttcgacaatgagatcaagtcccacctgaagtccctgccacagatggaaggcatcgacttcaacaatgccaacgtgacctatctgatcgccgagtacatgaagagagtgctggacgacgacttccagaccttctaccagtggaaccgcaactaccggtacatggacatgcttaagggcgagtacgacagaaagggctccctgcagcactgcttcaccagcgtggaagagagagaaggcctctggaaagagcgggcctccagaacagagcggtacagaaagcaggccagcaacaagatccgcagcaaccggcagatgagaaacgccagcagcgaagagatcgagacaatcctggataagcggctgagcaacagccggaacgagtaccagaaaagcgagaaagtgatccggcgctacagagtgcaggatgccctgctgtttctgctggccaaaaagaccctgaccgaactggccgatttcgacggcgagaggttcaaactgaaagaaatcatgcccgacgccgagaagggaatcctgagcgagatcatgcccatgagcttcaccttcgagaaaggcggcaagaagtacaccatcaccagcgagggcatgaagctgaagaactacggcgacttctttgtgctggctagcgacaagaggatcggcaacctgctggaactcgtgggcagcgacatcgtgtccaaagaggattagtaa

SEQ ID NO: 161 - DNA, 3423 bp, Artificial Sequence
  Chemically Synthesized
atggactacaaagaccatgacggtgattataaagatcatgacatcgattacaaggatgacgatgacaagggcggaatgagtgtgttgacgccgttgcttctgcgagggcttaccgggtctgctagaagacttccggtccccagggccaagatacatagcctcggagacccgatgtctgtgctcactcctctgcttttgcgaggactgactgggtccgccagacgactcccggtgccgagagctaaaatccatagcctgggaaaattggcaactatgtcagtcctgacgccgcttcttctccggggtcttacagggtctgcaagaaggctgcctgtacctcgggcgaaaattcatagcttgggcgacccgatgagtgtattgacgcccctgttgctgagaggattgactgggtcagcgcgccggctccctgtcccccgagctaagattcactcccttggtaagctgggaggcaacatccccgctctggtggaaaaccagaagaagtactttggcacctacagcgtgatggccatgctgaacgctcagaccgtgctggaccacatccagaaggtggccgatattgagggcgagcagaacgagaacaacgagaatctgtggtttcaccccgtgatgagccacctgtacaacgccaagaacggctacgacaagcagcccgagaaaaccatgttcatcatcgagcggctgcagagctacttcccattcctgaagatcatggccgagaaccagagagagtacagcaacggcaagtacaagcagaaccgcgtggaagtgaacagcaacgacatcttcgaggtgctgaagcgcgccttcggcgtgctgaagatgtacagggacctgaccaaccactacaagacctacgaggaaaagctgaacgacggctgcgagttcctgaccagcacagagcaacctctgagcggcatgatcaacaactactacacagtggccctgcggaacatgaacgagagatacggctacaagacagaggacctggccttcatccaggacaagcggttcaagttcgtgaaggacgcctacggcaagaaaaagtcccaagtgaataccggattcttcctgagcctgcaggactacaacggcgacacacagaagaagctgcacctgagcggagtgggaatcgccctgctgatctgcctgttcctggacaagcagtacatcaacatctttctgagcaggctgcccatcttctccagctacaatgcccagagcgaggaacggcggatcatcatcagatccttcggcatcaacagcatcaagctgcccaaggaccggatccacagcgagaagtccaacaagagcgtggccatggatatgctcaacgaagtgaagcggtgccccgacgagctgttcacaacactgtctgccgagaagcagtcccggttcagaatcatcagcgacgaccacaatgaagtgctgatgaagcggagcagcgacagattcgtgcctctgctgctgcagtatatcgattacggcaagctgttcgaccacatcaggttccacgtgaacatgggcaagctgagatacctgctgaaggccgacaagacctgcatcgacggccagaccagagtcagagtgatcgagcagcccctgaacggcttcggcagactggaagaggccgagacaatgcggaagcaagagaacggcaccttcggcaacagcggcatccggatcagagacttcgagaacatgaagcgggacgacgccaatcctgccaactatccctacatcgtggacacctacacacactacatcctggaaaacaacaaggtcgagatgtttatcaacgacaaagaggacagcgccccactgctgcccgtgatcgaggatgatagatacgtggtcaagacaatccccagctgccggatgagcaccctggaaattccagccatggccttccacatgtttctgttcggcagcaagaaaaccgagaagctgatcgtggacgtgcacaaccggtacaagagactgttccaggccatgcagaaagaagaagtgaccgccgagaatatcgccagcttcggaatcgccgagagcgacctgcctcagaagatcctggatctgatcagcggcaatgcccacggcaaggatgtggacgccttcatcagactgaccgtggacgacatgctgaccgacaccgagcggagaatcaagagattcaaggacgaccggaagtccattcggagcgccgacaacaagatgggaaagagaggcttcaagcagatctccacaggcaagctggccgacttcctggccaaggacatcgtgctgtttcagcccagcgtgaacgatggcgagaacaagatcaccggcctgaactaccggatcatgcagagcgccattgccgtgtacgatagcggcgacgattacgaggccaagcagcagttcaagctgatgttcgagaaggcccggctgatcggcaagggcacaacagagcctcatccatttctgtacaaggtgttcgcccgcagcatccccgccaatgccgtcgagttctacgagcgctacctgatcgagcggaagttctacctgaccggcctgtccaacgagatcaagaaaggcaacagagtggatgtgcccttcatccggcgggaccagaacaagtggaaaacacccgccatgaagaccctgggcagaatctacagcgaggatctgcccgtggaactgcccagacagatgttcgacaatgagatcaagtcccacctgaagtccctgccacagatggaaggcatcgacttcaacaatgccaacgtgacctatctgatcgccgagtacatgaagagagtgctggacgacgacttccagaccttctaccagtggaaccgcaactaccggtacatggacatgcttaagggcgagtacgacagaaagggctccctgcagcactgcttcaccagcgtggaagagagagaaggcctctggaaagagcgggcctccagaacagagcggtacagaaagcaggccagcaacaagatccgcagcaaccggcagatgagaaacgccagcagcgaagagatcgagacaatcctggataagcggctgagcaacagccggaacgagtaccagaaaagcgagaaagtgatccggcgctacagagtgcaggatgccctgctgtttctgctggccaaaaagaccctgaccgaactggccgatttcgacggcgagaggttcaaactgaaagaaatcatgcccgacgccgagaagggaatcctgagcgagatcatgcccatgagcttcaccttcgagaaaggcggcaagaagtacaccatcaccagcgagggcatgaagctgaagaactacggcgacttctttgtgctggctagcgacaagaggatcggcaacctgctggaactcgtgggcagcgacatcgtgtccaaagaggattagtaa

SEQ ID NO: 162 - DNA, 3093 bp, Artificial Sequence
  Chemically Synthesized
atggactacaaagaccatgacggtgattataaagatcatgacatcgattacaaggatgacgatgacaagggcggaatgtacaggatgcaactcctgtcttgcattgcactaagtcttgcacttgtcacgaattccggaggcaacatccccgctctggtggaaaaccagaagaagtactttggcacctacagcgtgatggccatgctgaacgctcagaccgtgctggaccacatccagaaggtggccgatattgagggcgagcagaacgagaacaacgagaatctgtggtttcaccccgtgatgagccacctgtacaacgccaagaacggctacgacaagcagcccgagaaaaccatgttcatcatcgagcggctgcagagctacttcccattcctgaagatcatggccgagaaccagagagagtacagcaacggcaagtacaagcagaaccgcgtggaagtgaacagcaacgacatcttcgaggtgctgaagcgcgccttcggcgtgctgaagatgtacagggacctgaccaaccactacaagacctacgaggaaaagctgaacgacggctgcgagttcctgaccagcacagagcaacctctgagcggcatgatcaacaactactacacagtggccctgcggaacatgaacgagagatacggctacaagacagaggacctggccttcatccaggacaagcggttcaagttcgtgaaggacgcctacggcaagaaaaagtcccaagtgaataccggattcttcctgagcctgcaggactacaacggcgacacacagaagaagctgcacctgagcggagtgggaatcgccctgctgatctgcctgttcctggacaagcagtacatcaacatctttctgagcaggctgcccatcttctccagctacaatgcccagagcgaggaacggcggatcatcatcagatccttcggcatcaacagcatcaagctgcccaaggaccggatccacagcgagaagtccaacaagagcgtggccatggatatgctcaacgaagtgaagcggtgccccgacgagctgttcacaacactgtctgccgagaagcagtcccggttcagaatcatcagcgacgaccacaatgaagtgctgatgaagcggagcagcgacagattcgtgcctctgctgctgcagtatatcgattacggcaagctgttcgaccacatcaggttccacgtgaacatgggcaagctgagatacctgctgaaggccgacaagacctgcatcgacggccagaccagagtcagagtgatcgagcagcccctgaacggcttcggcagactggaagaggccgagacaatgcggaagcaagagaacggcaccttcggcaacagcggcatccggatcagagacttcgagaacatgaagcgggacgacgccaatcctgccaactatccctacatcgtggacacctacacacactacatcctggaaaacaacaaggtcgagatgtttatcaacgacaaagaggacagcgccccactgctgcccgtgatcgaggatgatagatacgtggtcaagacaatccccagctgccggatgagcaccctggaaattccagccatggccttccacatgtttctgttcggcagcaagaaaaccgagaagctgatcgtggacgtgcacaaccggtacaagagactgttccaggccatgcagaaagaagaagtgaccgccgagaatatcgccagcttcggaatcgccgagagcgacctgcctcagaagatcctggatctgatcagcggcaatgcccacggcaaggatgtggacgccttcatcagactgaccgtggacgacatgctgaccgacaccgagcggagaatcaagagattcaaggacgaccggaagtccattcggagcgccgacaacaagatgggaaagagaggcttcaagcagatctccacaggcaagctggccgacttcctggccaaggacatcgtgctgtttcagcccagcgtgaacgatggcgagaacaagatcaccggcctgaactaccggatcatgcagagcgccattgccgtgtacgatagcggcgacgattacgaggccaagcagcagttcaagctgatgttcgagaaggcccggctgatcggcaagggcacaacagagcctcatccatttctgtacaaggtgttcgcccgcagcatccccgccaatgccgtcgagttctacgagcgctacctgatcgagcggaagttctacctgaccggcctgtccaacgagatcaagaaaggcaacagagtggatgtgcccttcatccggcgggaccagaacaagtggaaaacacccgccatgaagaccctgggcagaatctacagcgaggatctgcccgtggaactgcccagacagatgttcgacaatgagatcaagtcccacctgaagtccctgccacagatggaaggcatcgacttcaacaatgccaacgtgacctatctgatcgccgagtacatgaagagagtgctggacgacgacttccagaccttctaccagtggaaccgcaactaccggtacatggacatgcttaagggcgagtacgacagaaagggctccctgcagcactgcttcaccagcgtggaagagagagaaggcctctggaaagagcgggcctccagaacagagcggtacagaaagcaggccagcaacaagatccgcagcaaccggcagatgagaaacgccagcagcgaagagatcgagacaatcctggataagcggctgagcaacagccggaacgagtaccagaaaagcgagaaagtgatccggcgctacagagtgcaggatgccctgctgtttctgctggccaaaaagaccctgaccgaactggccgatttcgacggcgagaggttcaaactgaaagaaatcatgcccgacgccgagaagggaatcctgagcgagatcatgcccatgagcttcaccttcgagaaaggcggcaagaagtacaccatcaccagcgagggcatgaagctgaagaactacggcgacttctttgtgctggctagcgacaagaggatcggcaacctgctggaactcgtgggcagcgacatcgtgtccaaagaggattagtaa

SEQ ID NO: 163 - DNA, 3162 bp, Artificial Sequence
  Chemically Synthesized
atggactacaaagaccatgacggtgattataaagatcatgacatcgattacaaggatgacgatgacaagggcggaatgggttgttgtttcagcaagacagcggcgaaaggtgaagcagcagcagaaagaccaggcgaggctgcggtagcatcaagtccctccaaggctaatgggcaggaaaacggacacgtcaaagttggaagcggaggcaacatccccgctctggtggaaaaccagaagaagtactttggcacctacagcgtgatggccatgctgaacgctcagaccgtgctggaccacatccagaaggtggccgatattgagggcgagcagaacgagaacaacgagaatctgtggtttcaccccgtgatgagccacctgtacaacgccaagaacggctacgacaagcagcccgagaaaaccatgttcatcatcgagcggctgcagagctacttcccattcctgaagatcatggccgagaaccagagagagtacagcaacggcaagtacaagcagaaccgcgtggaagtgaacagcaacgacatcttcgaggtgctgaagcgcgccttcggcgtgctgaagatgtacagggacctgaccaaccactacaagacctacgaggaaaagctgaacgacggctgcgagttcctgaccagcacagagcaacctctgagcggcatgatcaacaactactacacagtggccctgcggaacatgaacgagagatacggctacaagacagaggacctggccttcatccaggacaagcggttcaagttcgtgaaggacgcctacggcaagaaaaagtcccaagtgaataccggattcttcctgagcctgcaggactacaacggcgacacacagaagaagctgcacctgagcggagtgggaatcgccctgctgatctgcctgttcctggacaagcagtacatcaacatctttctgagcaggctgcccatcttctccagctacaatgcccagagcgaggaacggcggatcatcatcagatccttcggcatcaacagcatcaagctgcccaaggaccggatccacagcgagaagtccaacaagagcgtggccatggatatgctcaacgaagtgaagcggtgccccgacgagctgttcacaacactgtctgccgagaagcagtcccggttcagaatcatcagcgacgaccacaatgaagtgctgatgaagcggagcagcgacagattcgtgcctctgctgctgcagtatatcgattacggcaagctgttcgaccacatcaggttccacgtgaacatgggcaagctgagatacctgctgaaggccgacaagacctgcatcgacggccagaccagagtcagagtgatcgagcagcccctgaacggcttcggcagactggaagaggccgagacaatgcggaagcaagagaacggcaccttcggcaacagcggcatccggatcagagacttcgagaacatgaagcgggacgacgccaatcctgccaactatccctacatcgtggacacctacacacactacatcctggaaaacaacaaggtcgagatgtttatcaacgacaaagaggacagcgccccactgctgcccgtgatcgaggatgatagatacgtggtcaagacaatccccagctgccggatgagcaccctggaaattccagccatggccttccacatgtttctgttcggcagcaagaaaaccgagaagctgatcgtggacgtgcacaaccggtacaagagactgttccaggccatgcagaaagaagaagtgaccgccgagaatatcgccagcttcggaatcgccgagagcgacctgcctcagaagatcctggatctgatcagcggcaatgcccacggcaaggatgtggacgccttcatcagactgaccgtggacgacatgctgaccgacaccgagcggagaatcaagagattcaaggacgaccggaagtccattcggagcgccgacaacaagatgggaaagagaggcttcaagcagatctccacaggcaagctggccgacttcctggccaaggacatcgtgctgtttcagcccagcgtgaacgatggcgagaacaagatcaccggcctgaactaccggatcatgcagagcgccattgccgtgtacgatagcggcgacgattacgaggccaagcagcagttcaagctgatgttcgagaaggcccggctgatcggcaagggcacaacagagcctcatccatttctgtacaaggtgttcgcccgcagcatccccgccaatgccgtcgagttctacgagcgctacctgatcgagcggaagttctacctgaccggcctgtccaacgagatcaagaaaggcaacagagtggatgtgcccttcatccggcgggaccagaacaagtggaaaacacccgccatgaagaccctgggcagaatctacagcgaggatctgcccgtggaactgcccagacagatgttcgacaatgagatcaagtcccacctgaagtccctgccacagatggaaggcatcgacttcaacaatgccaacgtgacctatctgatcgccgagtacatgaagagagtgctggacgacgacttccagaccttctaccagtggaaccgcaactaccggtacatggacatgcttaagggcgagtacgacagaaagggctccctgcagcactgcttcaccagcgtggaagagagagaaggcctctggaaagagcgggcctccagaacagagcggtacagaaagcaggccagcaacaagatccgcagcaaccggcagatgagaaacgccagcagcgaagagatcgagacaatcctggataagcggctgagcaacagccggaacgagtaccagaaaagcgagaaagtgatccggcgctacagagtgcaggatgccctgctgtttctgctggccaaaaagaccctgaccgaactggccgatttcgacggcgagaggttcaaactgaaagaaatcatgcccgacgccgagaagggaatcctgagcgagatcatgcccatgagcttcaccttcgagaaaggcggcaagaagtacaccatcaccagcgagggcatgaagctgaagaactacggcgacttctttgtgctggctagcgacaagaggatcggcaacctgctggaactcgtgggcagcgacatcgtgtccaaagaggattagtaa

SEQ ID NO: 164 - DNA, 3084 bp, Artificial Sequence
  Chemically Synthesized
atggactacaaagaccatgacggtgattataaagatcatgacatcgattacaaggatgacgatgacaagggcggaatgctgctgcccgtccccctgctgctgggcctgctgggcgccgccgccgacggaggcaacatccccgctctggtggaaaaccagaagaagtactttggcacctacagcgtgatggccatgctgaacgctcagaccgtgctggaccacatccagaaggtggccgatattgagggcgagcagaacgagaacaacgagaatctgtggtttcaccccgtgatgagccacctgtacaacgccaagaacggctacgacaagcagcccgagaaaaccatgttcatcatcgagcggctgcagagctacttcccattcctgaagatcatggccgagaaccagagagagtacagcaacggcaagtacaagcagaaccgcgtggaagtgaacagcaacgacatcttcgaggtgctgaagcgcgccttcggcgtgctgaagatgtacagggacctgaccaaccactacaagacctacgaggaaaagctgaacgacggctgcgagttcctgaccagcacagagcaacctctgagcggcatgatcaacaactactacacagtggccctgcggaacatgaacgagagatacggctacaagacagaggacctggccttcatccaggacaagcggttcaagttcgtgaaggacgcctacggcaagaaaaagtcccaagtgaataccggattcttcctgagcctgcaggactacaacggcgacacacagaagaagctgcacctgagcggagtgggaatcgccctgctgatctgcctgttcctggacaagcagtacatcaacatctttctgagcaggctgcccatcttctccagctacaatgcccagagcgaggaacggcggatcatcatcagatccttcggcatcaacagcatcaagctgcccaaggaccggatccacagcgagaagtccaacaagagcgtggccatggatatgctcaacgaagtgaagcggtgccccgacgagctgttcacaacactgtctgccgagaagcagtcccggttcagaatcatcagcgacgaccacaatgaagtgctgatgaagcggagcagcgacagattcgtgcctctgctgctgcagtatatcgattacggcaagctgttcgaccacatcaggttccacgtgaacatgggcaagctgagatacctgctgaaggccgacaagacctgcatcgacggccagaccagagtcagagtgatcgagcagcccctgaacggcttcggcagactggaagaggccgagacaatgcggaagcaagagaacggcaccttcggcaacagcggcatccggatcagagacttcgagaacatgaagcgggacgacgccaatcctgccaactatccctacatcgtggacacctacacacactacatcctggaaaacaacaaggtcgagatgtttatcaacgacaaagaggacagcgccccactgctgcccgtgatcgaggatgatagatacgtggtcaagacaatccccagctgccggatgagcaccctggaaattccagccatggccttccacatgtttctgttcggcagcaagaaaaccgagaagctgatcgtggacgtgcacaaccggtacaagagactgttccaggccatgcagaaagaagaagtgaccgccgagaatatcgccagcttcggaatcgccgagagcgacctgcctcagaagatcctggatctgatcagcggcaatgcccacggcaaggatgtggacgccttcatcagactgaccgtggacgacatgctgaccgacaccgagcggagaatcaagagattcaaggacgaccggaagtccattcggagcgccgacaacaagatgggaaagagaggcttcaagcagatctccacaggcaagctggccgacttcctggccaaggacatcgtgctgtttcagcccagcgtgaacgatggcgagaacaagatcaccggcctgaactaccggatcatgcagagcgccattgccgtgtacgatagcggcgacgattacgaggccaagcagcagttcaagctgatgttcgagaaggcccggctgatcggcaagggcacaacagagcctcatccatttctgtacaaggtgttcgcccgcagcatccccgccaatgccgtcgagttctacgagcgctacctgatcgagcggaagttctacctgaccggcctgtccaacgagatcaagaaaggcaacagagtggatgtgcccttcatccggcgggaccagaacaagtggaaaacacccgccatgaagaccctgggcagaatctacagcgaggatctgcccgtggaactgcccagacagatgttcgacaatgagatcaagtcccacctgaagtccctgccacagatggaaggcatcgacttcaacaatgccaacgtgacctatctgatcgccgagtacatgaagagagtgctggacgacgacttccagaccttctaccagtggaaccgcaactaccggtacatggacatgcttaagggcgagtacgacagaaagggctccctgcagcactgcttcaccagcgtggaagagagagaaggcctctggaaagagcgggcctccagaacagagcggtacagaaagcaggccagcaacaagatccgcagcaaccggcagatgagaaacgccagcagcgaagagatcgagacaatcctggataagcggctgagcaacagccggaacgagtaccagaaaagcgagaaagtgatccggcgctacagagtgcaggatgccctgctgtttctgctggccaaaaagaccctgaccgaactggccgatttcgacggcgagaggttcaaactgaaagaaatcatgcccgacgccgagaagggaatcctgagcgagatcatgcccatgagcttcaccttcgagaaaggcggcaagaagtacaccatcaccagcgagggcatgaagctgaagaactacggcgacttctttgtgctggctagcgacaagaggatcggcaacctgctggaactcgtgggcagcgacatcgtgtccaaagaggattagtaa

SEQ ID NO: 165 - DNA, 3063 bp, Artificial Sequence
  Chemically Synthesized
atggactacaaagaccatgacggtgattataaagatcatgacatcgattacaaggatgacgatgacaagggcggagggatcactctcggcaaggacgagctgtaaggaggcaacatccccgctctggtggaaaaccagaagaagtactttggcacctacagcgtgatggccatgctgaacgctcagaccgtgctggaccacatccagaaggtggccgatattgagggcgagcagaacgagaacaacgagaatctgtggtttcaccccgtgatgagccacctgtacaacgccaagaacggctacgacaagcagcccgagaaaaccatgttcatcatcgagcggctgcagagctacttcccattcctgaagatcatggccgagaaccagagagagtacagcaacggcaagtacaagcagaaccgcgtggaagtgaacagcaacgacatcttcgaggtgctgaagcgcgccttcggcgtgctgaagatgtacagggacctgaccaaccactacaagacctacgaggaaaagctgaacgacggctgcgagttcctgaccagcacagagcaacctctgagcggcatgatcaacaactactacacagtggccctgcggaacatgaacgagagatacggctacaagacagaggacctggccttcatccaggacaagcggttcaagttcgtgaaggacgcctacggcaagaaaaagtcccaagtgaataccggattcttcctgagcctgcaggactacaacggcgacacacagaagaagctgcacctgagcggagtgggaatcgccctgctgatctgcctgttcctggacaagcagtacatcaacatctttctgagcaggctgcccatcttctccagctacaatgcccagagcgaggaacggcggatcatcatcagatccttcggcatcaacagcatcaagctgcccaaggaccggatccacagcgagaagtccaacaagagcgtggccatggatatgctcaacgaagtgaagcggtgccccgacgagctgttcacaacactgtctgccgagaagcagtcccggttcagaatcatcagcgacgaccacaatgaagtgctgatgaagcggagcagcgacagattcgtgcctctgctgctgcagtatatcgattacggcaagctgttcgaccacatcaggttccacgtgaacatgggcaagctgagatacctgctgaaggccgacaagacctgcatcgacggccagaccagagtcagagtgatcgagcagcccctgaacggcttcggcagactggaagaggccgagacaatgcggaagcaagagaacggcaccttcggcaacagcggcatccggatcagagacttcgagaacatgaagcgggacgacgccaatcctgccaactatccctacatcgtggacacctacacacactacatcctggaaaacaacaaggtcgagatgtttatcaacgacaaagaggacagcgccccactgctgcccgtgatcgaggatgatagatacgtggtcaagacaatccccagctgccggatgagcaccctggaaattccagccatggccttccacatgtttctgttcggcagcaagaaaaccgagaagctgatcgtggacgtgcacaaccggtacaagagactgttccaggccatgcagaaagaagaagtgaccgccgagaatatcgccagcttcggaatcgccgagagcgacctgcctcagaagatcctggatctgatcagcggcaatgcccacggcaaggatgtggacgccttcatcagactgaccgtggacgacatgctgaccgacaccgagcggagaatcaagagattcaaggacgaccggaagtccattcggagcgccgacaacaagatgggaaagagaggcttcaagcagatctccacaggcaagctggccgacttcctggccaaggacatcgtgctgtttcagcccagcgtgaacgatggcgagaacaagatcaccggcctgaactaccggatcatgcagagcgccattgccgtgtacgatagcggcgacgattacgaggccaagcagcagttcaagctgatgttcgagaaggcccggctgatcggcaagggcacaacagagcctcatccatttctgtacaaggtgttcgcccgcagcatccccgccaatgccgtcgagttctacgagcgctacctgatcgagcggaagttctacctgaccggcctgtccaacgagatcaagaaaggcaacagagtggatgtgcccttcatccggcgggaccagaacaagtggaaaacacccgccatgaagaccctgggcagaatctacagcgaggatctgcccgtggaactgcccagacagatgttcgacaatgagatcaagtcccacctgaagtccctgccacagatggaaggcatcgacttcaacaatgccaacgtgacctatctgatcgccgagtacatgaagagagtgctggacgacgacttccagaccttctaccagtggaaccgcaactaccggtacatggacatgcttaagggcgagtacgacagaaagggctccctgcagcactgcttcaccagcgtggaagagagagaaggcctctggaaagagcgggcctccagaacagagcggtacagaaagcaggccagcaacaagatccgcagcaaccggcagatgagaaacgccagcagcgaagagatcgagacaatcctggataagcggctgagcaacagccggaacgagtaccagaaaagcgagaaagtgatccggcgctacagagtgcaggatgccctgctgtttctgctggccaaaaagaccctgaccgaactggccgatttcgacggcgagaggttcaaactgaaagaaatcatgcccgacgccgagaagggaatcctgagcgagatcatgcccatgagcttcaccttcgagaaaggcggcaagaagtacaccatcaccagcgagggcatgaagctgaagaactacggcgacttctttgtgctggctagcgacaagaggatcggcaacctgctggaactcgtgggcagcgacatcgtgtccaaagaggattagtaa

SEQ ID NO: 166 - DNA, 3045 bp, Artificial Sequence
  Chemically Synthesized
atggactacaaagaccatgacggtgattataaagatcatgacatcgattacaaggatgacgatgacaagggcggatccaaattataaggaggcaacatccccgctctggtggaaaaccagaagaagtactttggcacctacagcgtgatggccatgctgaacgctcagaccgtgctggaccacatccagaaggtggccgatattgagggcgagcagaacgagaacaacgagaatctgtggtttcaccccgtgatgagccacctgtacaacgccaagaacggctacgacaagcagcccgagaaaaccatgttcatcatcgagcggctgcagagctacttcccattcctgaagatcatggccgagaaccagagagagtacagcaacggcaagtacaagcagaaccgcgtggaagtgaacagcaacgacatcttcgaggtgctgaagcgcgccttcggcgtgctgaagatgtacagggacctgaccaaccactacaagacctacgaggaaaagctgaacgacggctgcgagttcctgaccagcacagagcaacctctgagcggcatgatcaacaactactacacagtggccctgcggaacatgaacgagagatacggctacaagacagaggacctggccttcatccaggacaagcggttcaagttcgtgaaggacgcctacggcaagaaaaagtcccaagtgaataccggattcttcctgagcctgcaggactacaacggcgacacacagaagaagctgcacctgagcggagtgggaatcgccctgctgatctgcctgttcctggacaagcagtacatcaacatctttctgagcaggctgcccatcttctccagctacaatgcccagagcgaggaacggcggatcatcatcagatccttcggcatcaacagcatcaagctgcccaaggaccggatccacagcgagaagtccaacaagagcgtggccatggatatgctcaacgaagtgaagcggtgccccgacgagctgttcacaacactgtctgccgagaagcagtcccggttcagaatcatcagcgacgaccacaatgaagtgctgatgaagcggagcagcgacagattcgtgcctctgctgctgcagtatatcgattacggcaagctgttcgaccacatcaggttccacgtgaacatgggcaagctgagatacctgctgaaggccgacaagacctgcatcgacggccagaccagagtcagagtgatcgagcagcccctgaacggcttcggcagactggaagaggccgagacaatgcggaagcaagagaacggcaccttcggcaacagcggcatccggatcagagacttcgagaacatgaagcgggacgacgccaatcctgccaactatccctacatcgtggacacctacacacactacatcctggaaaacaacaaggtcgagatgtttatcaacgacaaagaggacagcgccccactgctgcccgtgatcgaggatgatagatacgtggtcaagacaatccccagctgccggatgagcaccctggaaattccagccatggccttccacatgtttctgttcggcagcaagaaaaccgagaagctgatcgtggacgtgcacaaccggtacaagagactgttccaggccatgcagaaagaagaagtgaccgccgagaatatcgccagcttcggaatcgccgagagcgacctgcctcagaagatcctggatctgatcagcggcaatgcccacggcaaggatgtggacgccttcatcagactgaccgtggacgacatgctgaccgacaccgagcggagaatcaagagattcaaggacgaccggaagtccattcggagcgccgacaacaagatgggaaagagaggcttcaagcagatctccacaggcaagctggccgacttcctggccaaggacatcgtgctgtttcagcccagcgtgaacgatggcgagaacaagatcaccggcctgaactaccggatcatgcagagcgccattgccgtgtacgatagcggcgacgattacgaggccaagcagcagttcaagctgatgttcgagaaggcccggctgatcggcaagggcacaacagagcctcatccatttctgtacaaggtgttcgcccgcagcatccccgccaatgccgtcgagttctacgagcgctacctgatcgagcggaagttctacctgaccggcctgtccaacgagatcaagaaaggcaacagagtggatgtgcccttcatccggcgggaccagaacaagtggaaaacacccgccatgaagaccctgggcagaatctacagcgaggatctgcccgtggaactgcccagacagatgttcgacaatgagatcaagtcccacctgaagtccctgccacagatggaaggcatcgacttcaacaatgccaacgtgacctatctgatcgccgagtacatgaagagagtgctggacgacgacttccagaccttctaccagtggaaccgcaactaccggtacatggacatgcttaagggcgagtacgacagaaagggctccctgcagcactgcttcaccagcgtggaagagagagaaggcctctggaaagagcgggcctccagaacagagcggtacagaaagcaggccagcaacaagatccgcagcaaccggcagatgagaaacgccagcagcgaagagatcgagacaatcctggataagcggctgagcaacagccggaacgagtaccagaaaagcgagaaagtgatccggcgctacagagtgcaggatgccctgctgtttctgctggccaaaaagaccctgaccgaactggccgatttcgacggcgagaggttcaaactgaaagaaatcatgcccgacgccgagaagggaatcctgagcgagatcatgcccatgagcttcaccttcgagaaaggcggcaagaagtacaccatcaccagcgagggcatgaagctgaagaactacggcgacttctttgtgctggctagcgacaagaggatcggcaacctgctggaactcgtgggcagcgacatcgtgtccaaagaggattagtaa

SEQ ID NO: 167 - DNA, 79 bp, Artificial Sequence
  Chemically Synthesized
ttaaaggtttataccttcccaggtaacaaaccaaccaactttcgatctcttgtagatctgttctctaaacgaactttaa

SEQ ID NO: 168 - DNA, 30 bp, Artificial Sequence
  Chemically Synthesized
aaaggtttataccttcccaggtaacaaacc

SEQ ID NO: 169 - DNA, 30 bp, Artificial Sequence
  Chemically Synthesized
gtttataccttcccaggtaacaaaccaacc

SEQ ID NO: 170 - DNA, 30 bp, Artificial Sequence
  Chemically Synthesized
ccttcccaggtaacaaaccaaccaactttc

SEQ ID NO: 171 - DNA, 30 bp, Artificial Sequence
  Chemically Synthesized
caggtaacaaaccaaccaactttcgatctc

SEQ ID NO: 172 - DNA, 30 bp, Artificial Sequence
  Chemically Synthesized
aaccaaccaactttcgatctcttgtagatc

SEQ ID NO: 173 - DNA, 30 bp, Artificial Sequence
  Chemically Synthesized
caactttcgatctcttgtagatctgttctc

SEQ ID NO: 174 - DNA, 30 bp, Artificial Sequence
  Chemically Synthesized
ttcgatctcttgtagatctgttctctaaac

SEQ ID NO: 175 - DNA, 81 bp, Artificial Sequence
  Chemically Synthesized
gtaacattagggaggacttgaaagagccaccacattttcaccaggccacgcggagtacgatcgagtgtacagtgaacaatg

SEQ ID NO: 176 - DNA, 30 bp, Artificial Sequence
  Chemically Synthesized
acattagggaggacttgaaagagccaccac

SEQ ID NO: 177 - DNA, 30 bp, Artificial Sequence
  Chemically Synthesized
gggaggacttgaaagagccaccacattttc

SEQ ID NO: 178 - DNA, 29 bp, Artificial Sequence
  Chemically Synthesized
ttgaaagagccaccacattttcaccaggc

SEQ ID NO: 179 - DNA, 29 bp, Artificial Sequence
  Chemically Synthesized
agagccaccacattttcaccaggccacgc

SEQ ID NO: 180 - DNA, 29 bp, Artificial Sequence
  Chemically Synthesized
attttcaccaggccacgcggagtacgatc

SEQ ID NO: 181 - DNA, 30 bp, Artificial Sequence
  Chemically Synthesized
acgcggagtacgatcgagtgtacagtgaac

SEQ ID NO: 182 - DNA, 79 bp, Artificial Sequence
  Chemically Synthesized
gattgcgagcgatttgcgtgcgtgcatcccgcttcactgatctcttgttagatcttttcataatctaaactttataaaa

SEQ ID NO: 183 - DNA, 79 bp, Artificial Sequence
  Chemically Synthesized
acattagggaggacttgaaagagccaccacattttcaccgaggccacgcggagtacgatcgagtgtacagtgaacaatg

SEQ ID NO: 184 - DNA, 40 bp, Artificial Sequence
  Chemically Synthesized
atcgtgctacaacttcctcaaggaacaacattgccaaaag

SEQ ID NO: 185 - DNA, 36 bp, Artificial Sequence
  Chemically Synthesized
cgcgcattggcatggaagtcacaccttcgggaacgt

SEQ ID NO: 186 - DNA, 30 bp, Artificial Sequence
  Chemically Synthesized
gctacaacttcctcaaggaacaacattgcc

SEQ ID NO: 187 - DNA, 30 bp, Artificial Sequence
  Chemically Synthesized
cattggcatggaagtcacaccttcgggaac

SEQ ID NO: 188 - DNA, 110 bp, Artificial Sequence
  Chemically Synthesized
attaaaggtttataccttcccaggtaacaaaccaaccaactttcgatctcttgtagatctgttctctaaacgaactttaaaaaggtttataccttcccaggtaacaaacc

SEQ ID NO: 189 - DNA, 30 bp, Artificial Sequence
  Chemically Synthesized
tttccaaatatggaagggtccattgtttgg

SEQ ID NO: 190 - DNA, 30 bp, Artificial Sequence
  Chemically Synthesized
caaatatggaagggtccattgtttggttgg

SEQ ID NO: 191 - DNA, 30 bp, Artificial Sequence
  Chemically Synthesized
ggaagggtccattgtttggttggttgaaag

SEQ ID NO: 192 - DNA, 30 bp, Artificial Sequence
  Chemically Synthesized
gtccattgtttggttggttgaaagctagag

SEQ ID NO: 193 - DNA, 30 bp, Artificial Sequence
  Chemically Synthesized
ttggttggttgaaagctagagaacatctag

SEQ ID NO: 194 - DNA, 30 bp, Artificial Sequence
  Chemically Synthesized
gttgaaagctagagaacatctagacaagag

SEQ ID NO: 195 - DNA, 30 bp, Artificial Sequence
  Chemically Synthesized
aagctagagaacatctagacaagagatttg

SEQ ID NO: 196 - DNA, 30 bp, Artificial Sequence
  Chemically Synthesized
tgtaatccctcctgaactttctcggtggtg

SEQ ID NO: 197 - DNA, 30 bp, Artificial Sequence
  Chemically Synthesized
ccctcctgaactttctcggtggtgtaaaag

SEQ ID NO: 198 - DNA, 30 bp, Artificial Sequence
  Chemically Synthesized
aactttctcggtggtgtaaaagtggctccg

SEQ ID NO: 199 - DNA, 30 bp, Artificial Sequence
  Chemically Synthesized
tctcggtggtgtaaaagtggctccggtgcg

SEQ ID NO: 200 - DNA, 30 bp, Artificial Sequence
  Chemically Synthesized
taaaagtggctccggtgcgcctcatgctag

SEQ ID NO: 201 - DNA, 30 bp, Artificial Sequence
  Chemically Synthesized
tgcgcctcatgctagctcacatgtcacttg

SEQ ID NO: 202 - DNA, 30 bp, Artificial Sequence
  Chemically Synthesized
ggtttgttacctgggaaggtataaaccttt

SEQ ID NO: 203 - DNA, 30 bp, Artificial Sequence
  Chemically Synthesized
ggttggtttgttacctgggaaggtataaac

SEQ ID NO: 204 - DNA, 30 bp, Artificial Sequence
  Chemically Synthesized
gaaagttggttggtttgttacctgggaagg

SEQ ID NO: 205 - DNA, 30 bp, Artificial Sequence
  Chemically Synthesized
gagatcgaaagttggttggtttgttacctg

SEQ ID NO: 206 - DNA, 30 bp, Artificial Sequence
  Chemically Synthesized
gatctacaagagatcgaaagttggttggtt

SEQ ID NO: 207 - DNA, 30 bp, Artificial Sequence
  Chemically Synthesized
gagaacagatctacaagagatcgaaagttg

SEQ ID NO: 208 - DNA, 30 bp, Artificial Sequence
  Chemically Synthesized
gtttagagaacagatctacaagagatcgaa

SEQ ID NO: 209 - DNA, 30 bp, Artificial Sequence
  Chemically Synthesized
gcgggatgcacgcacgcaaatcgctcgcaa

SEQ ID NO: 210 - DNA, 30 bp, Artificial Sequence
  Chemically Synthesized
gtgaagcgggatgcacgcacgcaaatcgct

SEQ ID NO: 211 - DNA, 30 bp, Artificial Sequence
  Chemically Synthesized
gagatcagtgaagcgggatgcacgcacgca

SEQ ID NO: 212 - DNA, 30 bp, Artificial Sequence
  Chemically Synthesized
gatctaacaagagatcagtgaagcgggatg

SEQ ID NO: 213 - DNA, 30 bp, Artificial Sequence
  Chemically Synthesized
gaaaagatctaacaagagatcagtgaagcg

SEQ ID NO: 214 - DNA, 30 bp, Artificial Sequence
  Chemically Synthesized
gattatgaaaagatctaacaagagatcagt

SEQ ID NO: 215 - DNA, 30 bp, Artificial Sequence
  Chemically Synthesized
gtttagattatgaaaagatctaacaagaga

SEQ ID NO: 216 - DNA, 30 bp, Artificial Sequence
  Chemically Synthesized
gtggtggctctttcaagtcctccctaatgt

SEQ ID NO: 217 - DNA, 30 bp, Artificial Sequence
  Chemically Synthesized
gaaaatgtggtggctctttcaagtcctccc

SEQ ID NO: 218 - DNA, 30 bp, Artificial Sequence
  Chemically Synthesized
gcctcggtgaaaatgtggtggctctttcaa

SEQ ID NO: 219 - DNA, 30 bp, Artificial Sequence
  Chemically Synthesized
gcgtggcctcggtgaaaatgtggtggctct

SEQ ID NO: 220 - DNA, 30 bp, Artificial Sequence
  Chemically Synthesized
gatcgtactccgcgtggcctcggtgaaaat

SEQ ID NO: 221 - DNA, 30 bp, Artificial Sequence
  Chemically Synthesized
gtacactcgatcgtactccgcgtggcctcg

SEQ ID NO: 222 - DNA, 30 bp, Artificial Sequence
  Chemically Synthesized
gttcactgtacactcgatcgtactccgcgt

SEQ ID NO: 223 - DNA, 30 bp, Artificial Sequence
  Chemically Synthesized
ggcaatgttgttccttgaggaagttgtagc

SEQ ID NO: 224 - DNA, 30 bp, Artificial Sequence
  Chemically Synthesized
gttcccgaaggtgtgacttccatgccaatg

SEQ ID NO: 225 - DNA, 60 bp, Artificial Sequence
  Chemically Synthesized
gtgttggtaatgaaacgaaaacgggactctagcatacttactgacagccagacagcgacc

SEQ ID NO: 226 - DNA, 60 bp, Artificial Sequence; identical to SEQ ID NO: 225
  Chemically Synthesized

SEQ ID NO: 227 - DNA, 60 bp, Artificial Sequence
  Chemically Synthesized
gtgttggtgatgaaacggaaacgggactctagcatacttactgacagtcagacagcgacc

SEQ ID NO: 228 - DNA, 60 bp, Artificial Sequence; identical to SEQ ID NO: 225
  Chemically Synthesized

SEQ ID NO: 229 - DNA, 60 bp, Artificial Sequence
  Chemically Synthesized
ggacggatcaagaaagaagagttctctgagatcatgaagatctgttccaccattgaagaa

SEQ ID NO: 230 - DNA, 60 bp, Artificial Sequence
  Chemically Synthesized
ggacggattaagaaggaagagttctctgagatcatgaagatctgttccaccattgaagaa

SEQ ID NO: 231 - DNA, 60 bp, Artificial Sequence
  Chemically Synthesized
ggaaggattaagaaagaagagtttgctgagatcatgaagatctgttccaccattgaagag

SEQ ID NO: 232 - DNA, 60 bp, Artificial Sequence
  Chemically Synthesized
ggacggattaagaaagaggagttcgctgagatcatgaagatctgttccaccattgaagag

SEQ ID NO: 233 - DNA, 61 bp, Artificial Sequence
  Chemically Synthesized
aatcgaggagtgcctgattaatgatccctgggttttgcttaatgcatcttggttcaactcc

SEQ ID NO: 234 - DNA, 61 bp, Artificial Sequence
  Chemically Synthesized
aattgaggagtgcctgattaatgatccctgggttttgctcaatgcatcttggttcaactcc

SEQ ID NO: 235 - DNA, 61 bp, Artificial Sequence; identical to SEQ ID NO: 233
  Chemically Synthesized

SEQ ID NO: 236 - DNA, 61 bp, Artificial Sequence
  Chemically Synthesized
aattgaggagtgcctgattaatgatccctgggttttgcttaatgcgtcttggttcaactcc

SEQ ID NO: 237 - DNA, 60 bp, Artificial Sequence
  Chemically Synthesized
ttgacatgagtaatgaagggtcttatttcttcggagacaatgcagaggagtatgacagtt

SEQ ID NO: 238 - DNA, 60 bp, Artificial Sequence
  Chemically Synthesized
ttgatatgagtaatgaaggatcttatttcttcggagacaatgcagaagagtacgacaatt

SEQ ID NO: 239 - DNA, 60 bp, Artificial Sequence
  Chemically Synthesized
ttgacatgaataatgaaggatcttatttcttcggagacaatgcagaggagtatgacaatt

SEQ ID NO: 240 - DNA, 60 bp, Artificial Sequence
  Chemically Synthesized
ttgacatgagtaatgaaggatcttatttcttcggagacaatgcagaggagtacgacaatt

SEQ ID NO: 241 - DNA, 60 bp, Artificial Sequence
  Chemically Synthesized
ttctatcatcccgtcaggccccctcaaagccgagatcgcgcagagactggaaagtgtctt

SEQ ID NO: 242 - DNA, 60 bp, Artificial Sequence
  Chemically Synthesized
ctctatcgttccatcaggccccctcaaagccgagatcgcgcagagacttgaagatgtctt

SEQ ID NO: 243 - DNA, 60 bp, Artificial Sequence
  Chemically Synthesized
ctctatcattccatcaggccccctcaaagccgagatcgcacagagacttgaggatgtttt

SEQ ID NO: 244 - DNA, 60 bp, Artificial Sequence
  Chemically Synthesized
ctctatcgtcccgtcaggccccctcaaagccgagatcgcacagagacttgaagatgtctt

SEQ ID NO: 245 - DNA, 30 bp, Artificial Sequence
  Chemically Synthesized
gctgtcagtaagtatgctagagtcccgttt

SEQ ID NO: 246 - DNA, 30 bp, Artificial Sequence
  Chemically Synthesized
cttcaatggtggaacagatcttcatgatct

SEQ ID NO: 247 - DNA, 30 bp, Artificial Sequence
  Chemically Synthesized
gcaaaacccagggatcattaatcaggcact

SEQ ID NO: 248 - DNA, 30 bp, Artificial Sequence
  Chemically Synthesized
tctgcattgtctccgaagaaataagaccct

SEQ ID NO: 249 - DNA, 30 bp, Artificial Sequence
  Chemically Synthesized
ctgcgcgatctcggctttgagggggcctga

SEQ ID NO: 250 - DNA, 30 bp, Artificial Sequence
  Chemically Synthesized
aaacgggactctagcatacttactgacagc

SEQ ID NO: 251 - DNA, 30 bp, Artificial Sequence
  Chemically Synthesized
gagatcatgaagatctgttccaccattgaa

SEQ ID NO: 252 - DNA, 30 bp, Artificial Sequence
  Chemically Synthesized
gaggagtgcctgattaatgatccctgggtt

SEQ ID NO: 253 - DNA, 30 bp, Artificial Sequence
  Chemically Synthesized
aggatcttatttcttcggagacaatgcaga

SEQ ID NO: 254 - DNA, 30 bp, Artificial Sequence
  Chemically Synthesized
tcaggccccctcaaagccgagatcgcgcag

SEQ ID NO: 255 - DNA, 22 bp, Artificial Sequence
  Chemically Synthesized
gtcagtaagtatgctagagtcc

SEQ ID NO: 256 - DNA, 22 bp, Artificial Sequence
  Chemically Synthesized
ttcaatggtggaacagatcttc

SEQ ID NO: 257 - DNA, 22 bp, Artificial Sequence
  Chemically Synthesized
acccagggatcattaatcaggc

SEQ ID NO: 258 - DNA, 22 bp, Artificial Sequence
  Chemically Synthesized
tctgcattgtctccgaagaaat

SEQ ID NO: 259 - DNA, 22 bp, Artificial Sequence
  Chemically Synthesized
gcgatctcggctttgagggggc

SEQ ID NO: 260 - DNA, 22 bp, Artificial Sequence
  Chemically Synthesized
ggactctagcatacttactgac

SEQ ID NO: 261 - DNA, 22 bp, Artificial Sequence
  Chemically Synthesized
gaagatctgttccaccattgaa

SEQ ID NO: 262 - DNA, 22 bp, Artificial Sequence
  Chemically Synthesized
gcctgattaatgatccctgggt

SEQ ID NO: 263 - DNA, 22 bp, Artificial Sequence
  Chemically Synthesized
atttcttcggagacaatgcaga

SEQ ID NO: 264 - DNA, 22 bp, Artificial Sequence
  Chemically Synthesized
gccccctcaaagccgagatcgc

SEQ ID NO: 265 - DNA, 34 bp, Artificial Sequence
  Chemically Synthesized
gttggaactgctcattttggagggtaatcacaac

SEQ ID NO: 266 - DNA, 36 bp, Artificial Sequence
  Chemically Synthesized
gttgcatctgccttctttttgaaaggtaaaaacaac

SEQ ID NO: 267 - DNA, 36 bp, Artificial Sequence
  Chemically Synthesized
gttgtggaaggtccagttttgaggggctattacaac

SEQ ID NO: 268 - DNA, 36 bp, Artificial Sequence
  Chemically Synthesized
gttgtggaaggtccagctttgaggggctattacaac

SEQ ID NO: 269 - DNA, 36 bp, Artificial Sequence
  Chemically Synthesized
gttgtggaaggtccagatttgaggggctattacaac

SEQ ID NO: 270 - DNA, 36 bp, Artificial Sequence
  Chemically Synthesized
gttgtggaaggtccaggtttgaggggctattacaac

SEQ ID NO: 271 - DNA, 36 bp, Artificial Sequence
  Chemically Synthesized
gttgtggaaggtccagtcttgaggggctattacaac

SEQ ID NO: 272 - DNA, 36 bp, Artificial Sequence
  Chemically Synthesized
gttgtggaaggtccagtattgaggggctattacaac

SEQ ID NO: 273 - DNA, 36 bp, Artificial Sequence
  Chemically Synthesized
gttgtggaaggtccagtgttgaggggctattacaac

SEQ ID NO: 274 - DNA, 36 bp, Artificial Sequence
  Chemically Synthesized
gttgtggaaggtccagttctgaggggctattacaac

SEQ ID NO: 275 - DNA, 162 bp, Artificial Sequence
  Chemically Synthesized
gagatcgaaagttggttggtttgttacctggttgtggaaggtccagtcttgaggggctattacaacgttcccgaaggtgtgacttccatgccaatggttgtggaaggtccagctttgaggggctattacaacgcgtggcctcggtgaaaatgtggtggctct

SEQ ID NO: 276 - DNA, 294 bp, Artificial Sequence
  Chemically Synthesized
gctgtcagtaagtatgctagagtcccgtttgttgtggaaggtccagtcttgaggggctattacaaccttcaatggtggaacagatcttcatgatctgttgtggaaggtccagctttgaggggctattacaacgcaaaacccagggatcattaatcaggcactgttgtggaaggtccagtgttgaggggctattacaactctgcattgtctccgaagaaataagaccctgttgtggaaggtccaggtttgaggggctattacaacctgcgcgatctcggctttgagggggcctga

SEQ ID NO: 277 - DNA, 294 bp, Artificial Sequence
  Chemically Synthesized
gagatcatgaagatctgttccaccattgaagttgtggaaggtccagtcttgaggggctattacaacaaacgggactctagcatacttactgacagcgttgtggaaggtccagctttgaggggctattacaacgaggagtgcctgattaatgatccctgggttgttgtggaaggtccagtgttgaggggctattacaacaggatcttatttcttcggagacaatgcagagttgtggaaggtccaggtttgaggggctattacaactcaggccccctcaaagccgagatcgcgcag

SEQ ID NO: 278 - DNA, 273 bp, Artificial Sequence
  Chemically Synthesized
gaacccctaccaactggtcggggtttgaaacgtcagtaagtatgctagagtccgaacccctaccaactggtcggggtttgaaacttcaatggtggaacagatcttcgaacccctaccaactggtcggggtttgaaacacccagggatcattaatcaggcgaacccctaccaactggtcggggtttgaaactctgcattgtctccgaagaaatgaacccctaccaactggtcggggtttgaaacgcgatctcggctttgagggggctttttttt

SEQ ID NO: 279 - DNA, 273 bp, Artificial Sequence
  Chemically Synthesized
gaacccctaccaactggtcggggtttgaaacggactctagcatacttactgacgaacccctaccaactggtcggggtttgaaacgaagatctgttccaccattgaagaacccctaccaactggtcggggtttgaaacgcctgattaatgatccctgggtgaacccctaccaactggtcggggtttgaaacatttcttcggagacaatgcagagaacccctaccaactggtcggggtttgaaacgccccctcaaagccgagatcgctttttttt

SEQ ID NO: 280 - DNA, 11479 bp, Artificial Sequence
  Chemically Synthesized
gtcgacggatcgggagatctcccgatcccctatggtgcactctcagtacaatctgctctgatgccgcatagttaagccagtatctgctccctgcttgtgtgttggaggtcgctgagtagtgcgcgagaaaatttaagctacaacaaggcaaggcttgaccgacaattgcatgaagaatctgcttagggttaggcgttttgcgctgcttcgcgatgtacgggccagatatacgcgttgacattgattattgactagttattaatagtaatcaattacggggtcattagttcatagcccatattggagttccgcgttacataacttacggtaaatggcccgcctggctgaccgcccaacgacccccgcccattgacgtcaataatgacgtatgttcccatagtaacgccaatagggactttccattgacgtcaatgggtggagtatttacggtaaactgcccacttggcagtacatcaagtgatcatatgccaagtacgccccctattgacgtcaatgacggtaaatggcccgcctggcattatgcccagtacatgaccttatgggactttcctacttggcagtacatctacgtattagtcatcgctattaccatggtgatgcggttttggcagtacatcaatgggcgtggatagcgtttgactcacggggatttccaagtctccaccccattgacgtcaatgggagtttgttttggcaccaaaatcaacgggactttccaaaatgtcgtaacaactccgccccattgacgcaaatgggcggtaggcgtgtacggtgggaggtctatataagcagcgcgttttgcctgtactggtctctctggttagaccagatctgagcctgggagctctctggctaactagggaacccactgcttaagcctcaataaagcttgccttgagtgcttcaagtagtgtgtgcccgtctgttgtgtgactctggtaactagagatccctcagacccttttagtcagtgtggaaaatctctagagtggcgcccgaacagggacttgaaagcgaaagggaaaccagaggagctctctcgacgcaggactcggcttgctgaagcgcgcacggcaagaggcgaggggcggcgactggtgagtacgccaaaaattttgactagcggaggctagaaggagagagatgggtgcgagagcgtagtattaagcgggggagaattagatcgcgatgggaaaaaattcggttaaggccagggggaaagaaaaaatataaattaaaacatatagtatgggcaagcagggagctagaacgattcgcagttaatcctggcctgttagaaacatcagaaggctgtagacaaatctgggacagctacaaccatcccttcagacaggatcagaagaacttagatcattatataatacagtagcaaccctctattgtgtgcatcaaaggatagagataaaagacaccaaggaagctttagacaagatagaggaagagcaaaacaaaagtaagaccaccgcacacaagcggccgctgatcttcagacctggaggaggagatatgagggacaattggagaagtgaattatataaatataaagtagtaaaaattgaaccattaggagtagcacccaccaaggcaaagagaagagtggtgcagagagaaaaaagagcagtgggaataggagcttgttccttgggttcttgggagcagcaggaagcactatgggcgcagcgtcaatgacgctgacggtacaggccagacaattattgtctggtatagtgcagcagcagaacaatttgctgagggctattgaggcgcaacagcatctgttgcaactcacagtctggggcataagcagctccaggcaagaatcctggctgtggaaagatacctaaaggatcaacagctcctggggatttggggttgctctggaaaactcatttgcaccactgctgtgccttggaatgctagttggagtaataaatctctggaacagatttggaatcacacgacctggatgggtgggacagagaaattaacaattacacaagcttaatacactccttaattgaagaatcgcaaaaccagcaagaaaagaatgaacaagaattattggaattagataaatgggcaagtttgtggaattggtttaacataacaaattggctgtggtatataaaattattcataatgatgtaggaggcttggtaggtttaagaatagtttttgctgtactttctatagtgaatagagttaggcagggatattcaccattatcgtttcagacccacctcccaaccccgaggggacccgacaggcccgaaggaatagaagaagaaggtggagagagagacagagacagatccattcgatagtgaacggatcggcactgcgtgcgccaattctgcagacaaatggcagtattcatccacaattttaaaagaaaaggggggattggggggtacagtgcaggggaaagaatagtagacataatagcaacagacatacaaactaaagaattacaaaaacaaattacaaaattcaaaattttcgggtttattacagggacagcagagatccagtttggttaattaaggtaccgagggcctatttcccatgattccttcatatttgcatatacgatacaaggctgttagagagataattagaattaatttgactgtaaacacaaagatattagtacaaatacgtgacgtagaaagtaataatttcttgggtagtttgcagttttaaaattatgttttaaaatggactatcatatgcttaccgtaacttgaaagtatttcgatttcttggctttatatatcttgtggaaaggacgaaacaccggagacgctgggaccgtctcagttgtggaaggtccagtttgaggggctattacaactttttttgaattcgctagctaggtcttgaaaggagtgggaattggctccggtgcccgtcagtgggcagagcgcacatcgcccacagtccccgagaagttggggggaggggtcggcaattgatccggtgcctgagaaggtggcgcggggtaaactgggaaagtgatgtcgtgtactggctccgcctttttcccgagggtgggggagaaccgtatataagtgcagtagtcgccgtgaacgttctttttcgcaacgggtttgccgccagaacacaggctcgagcgccaccatggactacaagaccatgacggtgattataaagatcatgacatcgattacaaggatgacgatgacaagggatcccttcaactgcctccacttgaaagactgacactgggtagttccaacatccccgctctggtggaaaaccagaagaagtactttggcacctacagcgtgatggccatgctgaacgctcagaccgtgctggaccacatccagaaggtggccgatattgagggcgagcagaacgagaacaacgagaatctgtggtttcaccccgtgatgagccacctgtacaacgccaagaacggctacgacaagcagcccgagaaaaccatgttcatcatcgagcggctgcagagctacttcccattcctgaagatcatggccgagaaccagagagagtacagcaacggcaagtacaagcagaaccgcgtggaagtgaacagcaacgacatcttcgaggtgctgaagcgcgccttcggcgtgctgaagatgtacagggacctgaccaaccactacaagacctacgaggaaaagctgaacgacggctgcgagttcctgaccagcacagagcaacctctgagcggcatgatcaacaactactacacagtggccctgcggaacatgaacgagagatacggctacaagacagaggacctggccttcatccaggacaagcggttcaagttcgtgaaggacgcctacggcaagaaaaagtcccaagtgaataccggattcttcctgagcctgcaggactacaacggcgacacacagaagaagctgcacctgagcggagtgggaatcgccctgctgatctgcctgttcctggacaagcagtacatcaacatctttctgagcaggctgcccatcttctccagctacaatgcccagagcgaggaacggcggatcatcatcagatccttcggcatcaacagcatcaagctgcccaaggaccggatccacagcgagaagtccaacaagagcgtggccatggatatgctcaacgaagtgaagcggtgccccgacgagctgttcacaacactgtctgccgagaagcagtcccggttcagaatcatcagcgacgaccacaatgaagtgctgatgaagcggagcagcgacagattcgtgcctctgctgctgcagtatatcgattacggcaagctgttcgaccacatcaggttccacgtgaacatgggcaagctgagatacctgctgaaggccgacaagacctgcatcgacggccagaccagagtcagagtgatcgagcagcccctgaacggcttcggcagactggaagaggccgagacaatgcggaagcaagagaacggcaccttcggcaacagcggcatccggatcagagacttcgagaacatgaagcgggacgacgccaatcctgccaactatccctacatcgtggacacctacacacactacatcctggaaaacaacaaggtcgagatgtttatcaacgacaaagaggacagcgccccactgctgcccgtgatcgaggatgatagatacgtggtcaagacaatccccagctgccggatgagcaccctggaaattccagccatggccttccacatgtttctgttcggcagcaagaaaaccgagaagctgatcgtggacgtgcacaaccggtacaagagactgttccaggccatgcagaaagaagaagtgaccgccgagaatatcgccagcttcggaatcgccgagagcgacctgcctcagaagatcctggatctgatcagcggcaatgcccacggcaaggatgtggacgccttcatcagactgaccgtggacgacatgctgaccgacaccgagcggagaatcaagagattcaaggacgaccggaagtccattcggagcgccgacaacaagatgggaaagagaggcttcaagcagatctccacaggcaagctggccgacttcctggccaaggacatcgtgctgtttcagcccagcgtgaacgatggcgagaacaagatcaccggcctgaactaccggatcatgcagagcgccattgccgtgtacgatagcggcgacgattacgaggccaagcagcagttcaagctgatgttcgagaaggcccggctgatcggcaagggcacaacagagcctcatccatttctgtacaaggtgttcgcccgcagcatccccgccaatgccgtcgagttctacgagcgctacctgatcgagcggaagttctacctgaccggcctgtccaacgagatcaagaaaggcaacagagtggatgtgcccttcatccggcgggaccagaacaagtggaaaacacccgccatgaagaccctgggcagaatctacagcgaggatctgcccgtggaactgcccagacagatgttcgacaatgagatcaagtcccacctgaagtccctgccacagatggaaggcatcgacttcaacaatgccaacgtgacctatctgatcgccgagtacatgaagagagtgctggacgacgacttccagaccttctaccagtggaaccgcaactaccggtacatggacatgcttaagggcgagtacgacagaaagggctccctgcagcactgcttcaccagcgtggaagagagagaaggcctctggaaagagcgggcctccagaacagagcggtacagaaagcaggccagcaacaagatccgcagcaaccggcagatgagaaacgccagcagcgaagagatcgagacaatcctggataagcggctgagcaacagccggaacgagtaccagaaaagcgagaaagtgatccggcgctacagagtgcaggatgccctgctgtttctgctggccaaaaagaccctgaccgaactggccgatttcgacggcgagaggttcaaactgaaagaaatcatgcccgacgccgagaagggaatcctgagcgagatcatgcccatgagcttcaccttcgagaaaggcggcaagaagtacaccatcaccagcgagggcatgaagctgaagaactacggcgacttctttgtgctggctagcgacaagaggatcggcaacctgctggaactcgtgggcagcgacatcgtgtccaaagaggatatcatggaagagttcaacaaatacgaccagtgcaggcccgagatcagctccatcgtgttcaacctggaaaagtgggccttcgacacataccccgagctgtctgccagagtggaccgggaagagaaggtggacttcaagagcatcctgaaaatcctgctgaacaacaagaacatcaacaaagagcagagcgacatcctgcggaagatccggaacgccttcgatcacaacaattaccccgacaaaggcgtggtggaaatcaaggccctgcctgagatcgccatgagcatcaagaaggcctttggggagtacgccatcatgaagtagtaatctagaacgcgttaagtcgacaatcaacctctggattacaaaatttgtgaaagattgactggtattcttaactatgttgctccttttacgctatgtggatacgctgctttaatgcctttgtatcatgctattgcttcccgtatggctttcattttctcctccttgtataaatcctggttgctgtctctttatgaggagttgtggcccgttgtcaggcaacgtggcgtggtgtgcactgtgtttgctgacgcaacccccactggttggggcattgccaccacctgtcagctcctttccgggactttcgctttccccctccctattgccacggcggaactcatcgccgcctgccttgcccgctgctggacaggggctcggctgttgggcactgacaattccgtggtgttgtcggggaaatcatcgtcctttccttggctgctcgcctgtgttgccacctggattctgcgcgggacgtccttctgctacgtcccttcggccctcaatccagcggaccttccttcccgcggcctgctgccggctctgcggcctcttccgcgtcttcgccttcgccctcagacgagtcggatctccctttgggccgcctccccgcgtcgactttaagaccaatgacttacaaggcagctgtagatcttagccactttttaaaagaaaaggggggactggaagggctaattcactcccaacgaagacaagatctgctttttgcttgtactgggtctctctggttagaccagatctgagcctgggagctctctggctaactagggaacccactgcttaagcctcaataaagcttgccttgagtgcttcaagtagtgtgtgcccgtctgttgtgtgactctggtaactagagatccctcagacccttttagtcagtgtggaaaatctctagcagggcccgtttaaacccgctgatcagcctcgactgtgccttctagttgccagccatctgttgtttgcccctcccccgtgccttccttgaccctggaaggtgccctcccactgtcctttcctaataaaatgaggaaattgcatcgcattgtctgagtaggtgtcattctattctggggggtggggtggggcaggacagcaagggggaggattgggaagacaatagcaggcatgctggggatgcggtgggctctatggcttctgaggcggaagaaccagctggggctctagggggtatccccacgcgccctgtagcggcgcattaagcgcggcgggtgtggtggttacgcgcagcgtgaccgctacacttgccagcgccctagcgcccgctcctttcgctttcttcccttcctttctcgccacgttcgccggctttccccgcaagctctaaatcgggggctccctttagggttccgatttagtgctttacggcacctcgaccccaaaaaacttgattagggtgatggttcacgtagtgggccatcgccctgatagacggtttttcgccctttgacgttggagtccacgttctttaatagtggactcttgttccaaactggacaacactcaaccctatctcggtctattcttttgatttataagggattttgccgatttcggcctattggttaaaaaatgagctgatttaacaaaaatttaacgcgaattaattctgtggaatgtgtgtcagttagggtgtggaaagtccccaggctccccagcaggcagaagtatgcaaagatgcatctcaattagtcagcaaccaggtgtggaaagtccccaggctccccagcaggcagaagtatgcaaagcatgcatctcaattagtcagcaaccatagtcccgcccctaactccgcccatcccgcccctaactccgcccagttccgcccattctccgccccatggctgactattttttttatttatgcagaggccgaggccgcctctgcctctgagctattccagaagtagtgaggaggcttttttggaggcctaggcttttgcaaaaagctcccgggagcttgtatatccattttcggatctgatcagcacgtgttgacaattaatcatcggcatagtatatcggatagtataatacgacaaggtgaggaactaaaccatggccaagttgaccagtgccgttccggtgctcaccgcgcgcgacgtcgccggagcggtcgagttctggaccgaccggctcgggttctcccgggacttcgtggaggacgacttcgccggtgtggtccgggacgacgtgacccgttcatcagcgcggtccaggaccaggtggtgccggacaacaccctggcctgggtgtgggtgcgcggcctggacgagctgtacgccgagtggtcggaggtcgtgtccacgaacttccgggacgcctccgggccggccatgaccgagatcggcgagcagccgtgggggcggagttcgccctgcgcgacccggccggcaactgcgtgcacttcgtggccgaggagcaggactgacacgtgctacgagatttcgattccaccgccgccttctatgaaaggttgggcttcggaatcgttttccgggacgccggctggatgatcctccagcgcggggattcatgctggagttcttcgcccaccccaacttgtttattgcagcttataatggttacaaataaagcaatagcatcacaaatttcacaaataaagcatttttttcactgcattctagttgtggtttgtccaaactcatcaatgtatcttatcatgtctgtataccgtcgacctctagcagagcttggcgtaatcatggtcatagctgtttcctgtgtgaaattgttatccgctcacaattccacacaacatacgagccggaagcataaagtgtaaagcctggggtgcctaatgagtgagctaactcacattaattgcgttgcgctcactgcccgctttccagtcgggaaacctgtcgtgccactgcattaatgaatcggccaacgcgcggggagaggcggtttgcgtattgggcgctcttccgcttcctcgctcactgactcgctgcgctcggtcgttcggctgcggcgagcggtatcagctcactcaaaggcggtaatacggttatccacagaatcaggggataacgcaggaagaacatgtgagcaaaaggccagcaaaaggccaggaaccgtaaaaaggccgcgttgctggcgtttttccataggctccgcccccctgacgagcatcacaaaaatcgacgctcaagtcagaggtggcgaaacccgacaggactataaagataccaggcgtttccccctgaagctccctcgtgcgctctcctgttccgaccctgccgcttaccggatacctgtccgcctttctcccttcgggaagcgtggcgctttctcatagctcacgctgtaggtatctcagttcggtgtaggtcgttcgctccaagctgggctgtgtgcacgaaccccccgttcagccgaccgctgcgccttatccggtaactatcgtcttgagtccaacccggtaagacacgacttatcgccactggcagcagccactggtaacaggattagcagagcgaggtatgtaggcggtgctacagagttcttgaagtggtggcctaactacggctacactagaagaacagtatttggttctgcgctctgctgaagccagttaccttcggaaaaagagttggtagctcttgatccggcaaacaaaccaccgctggtagcggtggtttttttgtttgcaagcagcagattacgcgcagaaaaaaaggatctcaagaagatcctttgatcttttctacggggtctgacgctcatggaacgaaaactcacgttaagggattttggtcatgagattatcaaaaaggatcttcacctagatccttttaaattaaaaatgaagttttaaatcaatctaaagtatatatgagtaaacttggtctgacagttaccaatgcttaatcagtgaggcacctatctcagcgatctgtcatttcgttcatccatagttgcctgactccccgtcgtgtagataactacgatacgggagggcttaccatctggccccagtgctgcaatgataccgcgagacccacgctcaccggctccagatttatcagcaataaaccagccagccggaagggccgagcgcagaagtggtcctgcaactttaccgcctccatccagtctattaattgttgccgggaagctagagtaagtagttcgccagttaatagtttgcgcaacgttgttgccattgctacaggcatcgtggtgtcacgctcgtcgtttggtatggcttcattcagctccggttcccaacgatcaaggcgagttacatgacccccatgttgtgcaaaaaagcggttagctccttcggtcctccgatcgttgtcagaagtaagttggccgcagtgttatcactcatggttatggcagcactgcataattctcttactgtcatgccatccgtaagatgcttttctgtgactggtgagtactcaaccaagtcattctgagaatgtgtatgcggcgaccgagttgctcttgcccggcgtcaatacgggataataccgcgccacatagcagaactttaaaagtgctcatcattggaaaacgttcttcggggcgaaaactctcaaggatcttaccgctgttgagatccagttcgatgtaacccactcgtgcacccaactgatctcagcatcttttactttcaccagcgtttctgggtgagcaaaaacaggaaggcaaaatgccgcaaaaaagggaataagggcgacacggaaatgttgaatactcatactcttcctttttcaatattattgaagcatttatcagggttattgtctcatgagcggatacatatttgaatgatttagaaaaataaacaaataggggttccgcgcacatttccccgaaaagtgccacctgac

SEQ ID NO: 281 - DNA, 11560 bp, Artificial Sequence
  Chemically Synthesized
gtcgacggatcgggagatctcccgatcccctatggtgcactctcagtacaatctgctctgatgccgcatagttaagccagtatctgctccctgcttgtgtgttggaggtcgctgagtagtgcgcgagaaaatttaagctacaacaaggcaaggcttgaccgacaattgcatgaagaatctgcttagggttaggcgttttgcgctgcttcgcgatgtacgggccagatatacgcgttgacattgattattgactagttattaatagtaatcaattacggggtcattagttcatagcccatattggagttccgcgttacataacttacggtaaatggcccgcctggctgaccgcccaacgacccccgcccattgacgtcaataatgacgtatgttcccatagtaacgccaatagggactttccattgacgtcaatgggtggagtatttacggtaaactgcccacttggcagtacatcaagtgatcatatgccaagtacgccccctattgacgtcaatgacggtaaatggcccgcctggcattatgcccagtacatgaccttatgggactttcctacttggcagtacatctacgtattagtcatcgctattaccatggtgatgcggttttggcagtacatcaatgggcgtggatagcgtttgactcacggggatttccaagtctccaccccattgacgtcaatgggagtttgttttggcaccaaaatcaacgggactttccaaaatgtcgtaacaactccgccccattgacgcaaatgggcggtaggcgtgtacggtgggaggtctatataagcagcgcgttttgcctgtactggtctctctggttagaccagatctgagcctgggagctctctggctaactagggaacccactgcttaagcctcaataaagcttgccttgagtgcttcaagtagtgtgtgcccgtctgttgtgtgactctggtaactagagatccctcagacccttttagtcagtgtggaaaatctctagagtggcgcccgaacagggacttgaaagcgaaagggaaaccagaggagctctctcgacgcaggactcggcttgctgaagcgcgcacggcaagaggcgaggggcggcgactggtgagtacgccaaaaattttgactagcggaggctagaaggagagagatgggtgcgagagcgtagtattaagcgggggagaattagatcgcgatgggaaaaaattcggttaaggccagggggaaagaaaaaatataaattaaaacatatagtatgggcaagcagggagctagaacgattcgcagttaatcctggcctgttagaaacatcagaaggctgtagacaaatctgggacagctacaaccatcccttcagacaggatcagaagaacttagatcattatataatacagtagcaaccctctattgtgtgcatcaaaggatagagataaaagacaccaaggaagctttagacaagatagaggaagagcaaaacaaaagtaagaccaccgcacacaagcggccgctgatcttcagacctggaggaggagatatgagggacaattggagaagtgaattatataaatataaagtagtaaaaattgaaccattaggagtagcacccaccaaggcaaagagaagagtggtgcagagagaaaaaagagcagtgggaataggagcttgttccttgggttcttgggagcagcaggaagcactatgggcgcagcgtcaatgacgctgacggtacaggccagacaattattgtctggtatagtgcagcagcagaacaatttgctgagggctattgaggcgcaacagcatctgttgcaactcacagtctggggcataagcagctccaggcaagaatcctggctgtggaaagatacctaaaggatcaacagctcctggggatttggggttgctctggaaaactcatttgcaccactgctgtgccttggaatgctagttggagtaataaatctctggaacagatttggaatcacacgacctggatgggtgggacagagaaattaacaattacacaagcttaatacactccttaattgaagaatcgcaaaaccagcaagaaaagaatgaacaagaattattggaattagataaatgggcaagtttgtggaattggtttaacataacaaattggctgtggtatataaaattattcataatgatgtaggaggcttggtaggtttaagaatagtttttgctgtactttctatagtgaatagagttaggcagggatattcaccattatcgtttcagacccacctcccaaccccgaggggacccgacaggcccgaaggaatagaagaagaaggtggagagagagacagagacagatccattcgatagtgaacggatcggcactgcgtgcgccaattctgcagacaaatggcagtattcatccacaattttaaaagaaaaggggggattggggggtacagtgcaggggaaagaatagtagacataatagcaacagacatacaaactaaagaattacaaaaacaaattacaaaattcaaaattttcgggtttattacagggacagcagagatccagtttggttaattaaggtaccgagggcctatttcccatgattccttcatatttgcatatacgatacaaggctgttagagagataattagaattaatttgactgtaaacacaaagatattagtacaaatacgtgacgtagaaagtaataatttcttgggtagtttgcagttttaaaattatgttttaaaatggactatcatatgcttaccgtaacttgaaagtatttcgatttcttggctttatatatcttgtggaaaggacgaaacaccggagacgctgggaccgtctcagttgtggaaggtccagtttgaggggctattacaactttttttgaattcgctagctaggtcttgaaaggagtgggaattggctccggtgcccgtcagtgggcagagcgcacatcgcccacagtccccgagaagttggggggaggggtcggcaattgatccggtgcctgagaaggtggcgcggggtaaactgggaaagtgatgtcgtgtactggctccgcctttttcccgagggtgggggagaaccgtatataagtgcagtagtcgccgtgaacgttctttttcgcaacgggtttgccgccagaacacaggctcgagcgccaccatggactacaagaccatgacggtgattataaagatcatgacatcgattacaaggatgacgatgacaagggcggaaactcaaagaaaaggtcactggaggacaacgaaacggaaatcaaagtctccagagacacctggaacactaagaacatgcggtccctggaaccgccacgaagcaagaaacggatacatggaggcaacatccccgctctggtggaaaaccagaagaagtactttggcacctacagcgtgatggccatgctgaacgctcagaccgtgctggaccacatccagaaggtggccgatattgagggcgagcagaacgagaacaacgagaatctgtggtttcaccccgtgatgagccacctgtacaacgccaagaacggctacgacaagcagcccgagaaaaccatgttcatcatcgagcggctgcagagctacttcccattcctgaagatcatggccgagaaccagagagagtacagcaacggcaagtacaagcagaaccgcgtggaagtgaacagcaacgacatcttcgaggtgctgaagcgcgccttcggcgtgctgaagatgtacagggacctgaccaaccactacaagacctacgaggaaaagctgaacgacggctgcgagttcctgaccagcacagagcaacctctgagcggcatgatcaacaactactacacagtggccctgcggaacatgaacgagagatacggctacaagacagaggacctggccttcatccaggacaagcggttcaagttcgtgaaggacgcctacggcaagaaaaagtcccaagtgaataccggattcttcctgagcctgcaggactacaacggcgacacacagaagaagctgcacctgagcggagtgggaatcgccctgctgatctgcctgttcctggacaagcagtacatcaacatctttctgagcaggctgcccatcttctccagctacaatgcccagagcgaggaacggcggatcatcatcagatccttcggcatcaacagcatcaagctgcccaaggaccggatccacagcgagaagtccaacaagagcgtggccatggatatgctcaacgaagtgaagcggtgccccgacgagctgttcacaacactgtctgccgagaagcagtcccggttcagaatcatcagcgacgaccacaatgaagtgctgatgaagcggagcagcgacagattcgtgcctctgctgctgcagtatatcgattacggcaagctgttcgaccacatcaggttccacgtgaacatgggcaagctgagatacctgctgaaggccgacaagacctgcatcgacggccagaccagagtcagagtgatcgagcagcccctgaacggcttcggcagactggaagaggccgagacaatgcggaagcaagagaacggcaccttcggcaacagcggcatccggatcagagacttcgagaacatgaagcgggacgacgccaatcctgccaactatccctacatcgtggacacctacacacactacatcctggaaaacaacaaggtcgagatgtttatcaacgacaaagaggacagcgccccactgctgcccgtgatcgaggatgatagatacgtggtcaagacaatccccagctgccggatgagcaccctggaaattccagccatggccttccacatgtttctgttcggcagcaagaaaaccgagaagctgatcgtggacgtgcacaaccggtacaagagactgttccaggccatgcagaaagaagaagtgaccgccgagaatatcgccagcttcggaatcgccgagagcgacctgcctcagaagatcctggatctgatcagcggcaatgcccacggcaaggatgtggacgccttcatcagactgaccgtggacgacatgctgaccgacaccgagcggagaatcaagagattcaaggacgaccggaagtccattcggagcgccgacaacaagatgggaaagagaggcttcaagcagatctccacaggcaagctggccgacttcctggccaaggacatcgtgctgtttcagcccagcgtgaacgatggcgagaacaagatcaccggcctgaactaccggatcatgcagagcgccattgccgtgtacgatagcggcgacgattacgaggccaagcagcagttcaagctgatgttcgagaaggcccggctgatcggcaagggcacaacagagcctcatccatttctgtacaaggtgttcgcccgcagcatccccgccaatgccgtcgagttctacgagcgctacctgatcgagcggaagttctacctgaccggcctgtccaacgagatcaagaaaggcaacagagtggatgtgcccttcatccggcgggaccagaacaagtggaaaacacccgccatgaagaccctgggcagaatctacagcgaggatctgcccgtggaactgcccagacagatgttcgacaatgagatcaagtcccacctgaagtccctgccacagatggaaggcatcgacttcaacaatgccaacgtgacctatctgatcgccgagtacatgaagagagtgctggacgacgacttccagaccttctaccagtggaaccgcaactaccggtacatggacatgcttaagggcgagtacgacagaaagggctccctgcagcactgcttcaccagcgtggaagagagagaaggcctctggaaagagcgggcctccagaacagagcggtacagaaagcaggccagcaacaagatccgcagcaaccggcagatgagaaacgccagcagcgaagagatcgagacaatcctggataagcggctgagcaacagccggaacgagtaccagaaaagcgagaaagtgatccggcgctacagagtgcaggatgccctgctgtttctgctggccaaaaagaccctgaccgaactggccgatttcgacggcgagaggttcaaactgaaagaaatcatgcccgacgccgagaagggaatcctgagcgagatcatgcccatgagcttcaccttcgagaaaggcggcaagaagtacaccatcaccagcgagggcatgaagctgaagaactacggcgacttctttgtgctggctagcgacaagaggatcggcaacctgctggaactcgtgggcagcgacatcgtgtccaaagaggatatcatggaagagttcaacaaatacgaccagtgcaggcccgagatcagctccatcgtgttcaacctggaaaagtgggccttcgacacataccccgagctgtctgccagagtggaccgggaagagaaggtggacttcaagagcatcctgaaaatcctgctgaacaacaagaacatcaacaaagagcagagcgacatcctgcggaagatccggaacgccttcgatcacaacaattaccccgacaaaggcgtggtggaaatcaaggccctgcctgagatcgccatgagcatcaagaaggcctttggggagtacgccatcatgaagtagtaatctagaacgcgttaagtcgacaatcaacctctggattacaaaatttgtgaaagattgactggtattcttaactatgttgctccttttacgctatgtggatacgctgctttaatgcctttgtatcatgctattgcttcccgtatggctttcattttctcctccttgtataaatcctggttgctgtctctttatgaggagttgtggcccgttgtcaggcaacgtggcgtggtgtgcactgtgtttgctgacgcaacccccactggttggggcattgccaccacctgtcagctcctttccgggactttcgctttccccctccctattgccacggcggaactcatcgccgcctgccttgcccgctgctggacaggggctcggctgttgggcactgacaattccgtggtgttgtcggggaaatcatcgtcctttccttggctgctcgcctgtgttgccacctggattctgcgcgggacgtccttctgctacgtcccttcggccctcaatccagcggaccttccttcccgcggcctgctgccggctctgcggcctcttccgcgtcttcgccttcgccctcagacgagtcggatctccctttgggccgcctccccgcgtcgactttaagaccaatgacttacaaggcagctgtagatcttagccactttttaaaagaaaaggggggactggaagggctaattcactcccaacgaagacaagatctgctttttgcttgtactgggtctctctggttagaccagatctgagcctgggagctctctggctaactagggaacccactgcttaagcctcaataaagcttgccttgagtgcttcaagtagtgtgtgcccgtctgttgtgtgactctggtaactagagatccctcagacccttttagtcagtgtggaaaatctctagcagggcccgtttaaacccgctgatcagcctcgactgtgccttctagttgccagccatctgttgtttgcccctcccccgtgccttccttgaccctggaaggtgccactcccactgtcctttcctaataaaatgaggaaattgcatcgcatgtctgagtaggtgtcattctattctggggggtggggtggggcaggacagcaagggggaggattgggaagacaatagcaggcatgctggggatgcggtgggctctatggcttctgaggcggaaagaaccagctggggctctagggggtatccccacgcgccctgtagcggcgcattaacgcggcgggtgtggtggttacgcgcagcgtgaccgctacacttgccagcgccctagcgcccgctcctttcgctttcttcccttcctttctcgccacgttcgccggctttccccgtcaagctctaaatcgggggctccctttagggttccgatttagtgctttacggacctcgaccccaaaaaacttgattagggtgatggttcacgtagtgggccatcgccctgatagacggtttttcgccctttgacgttggagtccacgttctttaatagtggactcttgttccaaactggaacaacactcaaccctatctcggtctattcttttgatttataagggattttgcgatttcggcctattggttaaaaaatgagctgatttaacaaaaatttaacgcgaattaattctgtggaatgtgtgtcagttagggtgtggaaagtccccaggctccccagcaggcagaagtatgcaaagcatgcatctcaattagtcagcaaccaggtgtggaaagtccccaggctccccagcagcagaagtatgcaaagcatgcatctcaattagtcagcaaccatagtcccgcccctaactccgcccatcccgcccctaactccgcccagttccgcccattctccgccccatggctgactaattttttttatttatgcagaggccgaggccgcctctgcctctgagctattccgaagtagtgaggaggcttttttggaggcctaggcttttgcaaaaagctcccgggagcttgtatatccattttcggatctgatcagcacgtgttgacaattaatcatcggcatagtatatcggcatagtataatacgacaaggtgaggaactaaaccatggccaagttgaccagtgccgtccggtgctcaccgcgcgcgacgtcgccggagcggtcgagttctggaccgaccggctcgggttctcccgggacttcgtggaggacgacttcgccggtgtggtccgggacgacgtgaccctgttcatcagcgcggtccaggaccaggtggtgccggacaacaccctggcctggggtgggtgcgcggcctggacgagctgtacgccgagtggtcggaggtcgtgtccacgaacttccgggacgcctccgggccggccatgaccgagatcggcgagcagccgtgggggcgggagttcgccctgcgcgacccggccggcaactgcgtgcacttcgtggccgaggacaggactgacacgtgctacgagatttcgattccaccgccgccttctatgaaaggttgggcttcggaatcgttttccgggacgccggctggatgatcctccagcgcggggatctcatgctggagttcttcgcccaccccaacttgtttattgcagcttataatggttcaaataaagcaatagcatcacaaatttcacaaataaagcatttttttcactgcattctagttgtggtttgtccaaactcatcaatgtatcttatcatgtctgtataccgtcgacctctagctagagcttggcgtaatcatggtcatagctgtttcctgtgtgaaattgttatccgctcaaattccacacaacatacgagccggaagcataaagtgtaaagcctggggtgcctaatgagtgagctaactcacattaattgcgttgcgctcactgcccgctttccagtcgggaaacctgtcgtgccagctgcattaatgaatcggccaacgcgcggggagaggcggtttgcgtattgggcgtcttccgcttcctcgctcactgactcgctgcgctcggtcgttcggctgcggcgagcggtatcagctcactcaaaggcggtaatacggttatccacagaatcaggggataacgcaggaaagaacatgtgagcaaaaggccagcaaaaggccaggaaccgtaaaaaggccgcgttgctgcgtttttccataggctccgcccccctgacgagcatcacaaaaatcgacgctcaagtcagaggtggcgaaacccgacaggactataaagataccaggcgtttccccctggaagctccctcgtgcgctctcctgttccgaccctgccgcttaccggatacctgtcccctttctcccttcgggaagcgtggcgctttctcatagctcacgctgtaggtatctcagttcggtgtaggtcgttcgctccaagctgggctgtgtgcacgaaccccccgttcagcccgaccgctgcgccttatccggtaactatcgtcttgagtccaacccggtaagacacgactatcgccactggcagcagccactggtaacaggattagcagagcgaggtatgtaggcggtgctacagagttcttgaagtggtggcctaactacggctacactagaagaacagtatttggtatctgcgctctgctgaagccagttaccttcggaaaaagagttggtagctcttgaccggcaaacaaaccaccgctggtagcggtggtttttttgtttgcaagcagcagattacgcgcagaaaaaaaggatctcaagaagatcctttgatcttttctacggggtctgacgctcagtggaacgaaaactcacgttaagggattttggtcatgagattatcaaaaaggatcttccctagatccttttaaattaaaaatgaagttttaaatcaatctaaagtatatatgagtaaacttggtctgacagttaccaatgcttaatcagtgaggcacctatctcagcgatctgtctatttcgttcatccatagttgcctgactccccgtcgtgtagataactacgatacgggaggcttaccatctggccccagtgctgcaatgataccgcgagacccacgctcaccggctccagatttatcagcaataaaccagccagccggaagggccgagcgcagaagtggtcctgcaactttatccgcctccatccagtctattaattgttgccgggaagctagagtaagtagttcgcagttaatagtttgcgcaacgttgttgccattgctacaggcatcgtggtgtcacgctcgtcgtttggtatggcttcattcagctccggttcccaacgatcaaggcgagttacatgatcccccatgttgtgcaaaaaagcggttagctccttcggtcctccgatcgttgtcagaataagttggccgcagtgttatcactcatggttatggcagcactgcataattctcttactgtcatgccatccgtaagatgcttttctgtgactggtgagtactcaaccaagtcattctgagaatagtgtatgcggcgaccgagttgctcttgcccggcgtcaatacgggataataccgcgcacatagcagaactttaaaagtgctcatcattggaaaacgttcttcggggcgaaaactctcaaggatcttaccgctgttgagatccagttcgatgtaacccactcgtgcacccaactgatcttcagcatcttttactttcaccagcgtttctgggtgagcaaaaacaggaaggcaaatgccgcaaaaaagggaataagggcgacacggaaatgttgaatactcatactcttcctttttcaatattattgaagcatttatcagggttattgtctcatgagcggatacatatttgaatgtatttagaaaaataaacaaataggggttccgcgcacatttccccgaaaagtgcacctgac

SEQ ID NO: 282 - DNA, 12081 bp, Artificial Sequence
  Chemically Synthesized
gtcgacggatcgggagatctcccgatcccctatggtgcactctcagtacaatctgctctgatgccgcatagttaagccagtatctgctccctgcttgtgtgttggaggtcgctgagtagtgcgcgagcaaaatttaagctacaacaaggcaaggcttgaccgacaattgcatgaagaatctgcttagggttaggcgttttgcgctgcttcgcgatgtacgggccagatatacgcgttgacattgattattgactagttattaatagtaatcaattacggggtcattagttcatagcccatatatggagttccgcgttacataacttacggtaaatggcccgcctggctgaccgcccaacgacccccgcccattgacgtcaataatgacgtatgttcccatagtaacgccaatagggactttccattgacgtcaatgggtggagtatttacggtaaactgcccacttggcagtacatcaagtgtatcatatgccaagtacgccccctattgacgtcaatgacggtaaatggcccgcctggcattatgcccagtacatgaccttatgggactttcctacttggcagtacatctacgtattagtcatcgctattaccatggtgatgcggttttggcagtacatcaatgggcgtggatagcggtttgactcacggggatttccaagtctccaccccattgacgtcaatgggagtttgttttggcaccaaaatcaacgggactttccaaaatgtcgtaacaactccgccccattgacgcaaatgggcggtaggcgtgtacggtgggaggtctatataagcagcgcgttttgcctgtactgggtctctctggttagaccagatctgagcctgggagctctctggctaactagggaacccactgcttaagcctcaataaagcttgccttgagtgcttcaagtagtgtgtgcccgtctgttgtgtgactctggtaactagagatccctcagacccttttagtcagtgtggaaaatctctagcagtggcgcccgaacagggacttgaaagcgaaagggaaaccagaggagctctctcgacgcaggactcggcttgctgaagcgcgcacggcaagaggcgaggggcggcgactggtgagtacgccaaaaattttgactagcggaggctagaaggagagagatgggtgcgagagcgtcagtattaagcgggggagaattagatcgcgatgggaaaaaattcggttaaggccagggggaaagaaaaaatataaattaaaacatatagtatgggcaagcagggagctagaacgattcgcagttaatcctggcctgttagaaacatcagaaggctgtagacaaatactgggacagctacaaccatcccttcagacaggatcagaagaacttagatcattatataatacagtagcaaccctctattgtgtgcatcaaaggatagagataaaagacaccaaggaagctttagacaagatagaggaagagcaaaacaaaagtaagaccaccgcacagcaagcggccgctgatcttcagacctggaggaggagatatgagggacaattggagaagtgaattatataaatataaagtagtaaaaattgaaccattaggagtagcacccaccaaggcaaagagaagagtggtgcagagagaaaaaagagcagtgggaataggagctttgttccttgggttcttgggagcagcaggaagcactatgggcgcagcgtcaatgacgctgacggtacaggccagacaattattgtctggtatagtgcagcagcagaacaatttgctgagggctattgaggcgcaacagcatctgttgcaactcacagtctggggcatcaagcagctccaggcaagaatcctggctgtggaaagatacctaaaggatcaacagctcctggggatttggggttgctctggaaaactcatttgcaccactgctgtgccttggaatgctagttggagtaataaatctctggaacagatttggaatcacacgacctggatggagtgggacagagaaattaacaattacacaagcttaatacactccttaattgaagaatcgcaaaaccagcaagaaaagaatgaacaagaattattggaattagataaatgggcaagtttgtggaattggtttaacataacaaattggctgtggtatataaaattattcataatgatagtaggaggcttggtaggtttaagaatagtttttgctgtactttctatagtgaatagagttaggcagggatattcaccattatcgtttcagacccacctcccaaccccgaggggacccgacaggcccgaaggaatagaagaagaaggtggagagagagacagagacagatccattcgattagtgaacggatcggcactgcgtgcgccaattctgcagacaaatggcagtattcatccacaattttaaaagaaaaggggggattggggggtacagtgcaggggaaagaatagtagacataatagcaacagacatacaaactaaagaattacaaaaacaaattacaaaaattcaaaattttcgggtttattacagggacagcagagatccagtttggttaattaaggtaccgagggcctatttcccatgattccttcatatttgcatatacgatacaaggctgttagagagataattagaattaatttgactgtaaacacaaagatattagtacaaaatacgtgacgtagaaagtaataatttcttgggtagtttgcagttttaaaattatgttttaaaatggactatcatatgcttaccgtaacttgaaagtatttcgatttcttggctttatatatcttgtggaaaggacgaaacaccgagatcgaaagttggttggtttgttacctggttgtggaaggtccagttttgaggggctattacaactttttttgaattcacatcgatatctagaggtacccgttacataacttacggtaaatggcccgcctggctgaccgcccaacgacccccgcccattgacgtcaatagtaacgccaatagggactttccattgacgtcaatgggtggagtatttacggtaaactgcccacttggcagtacatcaagtgtatcatatgccaagtacgccccctattgacgtcaatgacggtaaatggcccgcctggcattgtgcccagtacatgaccttatgggactttcctacttggcagtacatctacgtattagtcatcgctattaccatggtcgaggtgagccccacgttctgcttcactctccccatctcccccccctccccacccccaattttgtatttatttattttttaattattttgtgcagcgatgggggcggggggggggggggggcggggcgaggggcggggcggggcgaggcggagaggtgcggcggcagccaatcagagcggcgcgctccgaaagtttccttttatggcgaggcggcggcggcggcggccctataaaaagcgaagcgcgcggcgggcgggagtcgctgcgcgctgccttcgccccgtgccccgctccgccgccgcctcgcgccgcccgccccggctctgactgaccgcgttactcccacaggtgagcgggcgggacggcccttctcctccgggctgtaattagctgagcaagaggtaagggtttaagggatggttggttggtggggtattaatgtttaattacctggagcacctgcctgaaatcactttttttcaggttggaccggtacatcgatactcgagcgccaccatggactacaaagaccatgacggtgattataaagatcatgacatcgattacaaggatgacgatgacaagggatcccttcaactgcctccacttgaaagactgacactgggtagttccaacatccccgctctggtggaaaaccagaagaagtactttggcacctacagcgtgatggccatgctgaacgctcagaccgtgctggaccacatccagaaggtggccgatattgagggcgagcagaacgagaacaacgagaatctgtggtttcaccccgtgatgagccacctgtacaacgccaagaacggctacgacaagcagcccgagaaaaccatgttcatcatcgagcggctgcagagctacttcccattcctgaagatcatggccgagaaccagagagagtacagcaacggcaagtacaagcagaaccgcgtggaagtgaacagcaacgacatcttcgaggtgctgaagcgcgccttcggcgtgctgaagatgtacagggacctgaccaaccactacaagacctacgaggaaaagctgaacgacggctgcgagttcctgaccagcacagagcaacctctgagcggcatgatcaacaactactacacagtggccctgcggaacatgaacgagagatacggctacaagacagaggacctggccttcatccaggacaagcggttcaagttcgtgaaggacgcctacggcaagaaaaagtcccaagtgaataccggattcttcctgagcctgcaggactacaacggcgacacacagaagaagctgcacctgagcggagtgggaatcgccctgctgatctgcctgttcctggacaagcagtacatcaacatctttctgagcaggctgcccatcttctccagctacaatgcccagagcgaggaacggcggatcatcatcagatccttcggcatcaacagcatcaagctgcccaaggaccggatccacagcgagaagtccaacaagagcgtggccatggatatgctcaacgaagtgaagcggtgccccgacgagctgttcacaacactgtctgccgagaagcagtcccggttcagaatcatcagcgacgaccacaatgaagtgctgatgaagcggagcagcgacagattcgtgcctctgctgctgcagtatatcgattacggcaagctgttcgaccacatcaggttccacgtgaacatgggcaagctgagatacctgctgaaggccgacaagacctgcatcgacggccagaccagagtcagagtgatcgagcagcccctgaacggcttcggcagactggaagaggccgagacaatgcggaagcaagagaacggcaccttcggcaacagcggcatccggatcagagacttcgagaacatgaagcgggacgacgccaatcctgccaactatccctacatcgtggacacctacacacactacatcctggaaaacaacaaggtcgagatgtttatcaacgacaaagaggacagcgccccactgctgcccgtgatcgaggatgatagatacgtggtcaagacaatccccagctgccggatgagcaccctggaaattccagccatggccttccacatgtttctgttcggcagcaagaaaaccgagaagctgatcgtggacgtgcacaaccggtacaagagactgttccaggccatgcagaaagaagaagtgaccgccgagaatatcgccagcttcggaatcgccgagagcgacctgcctcagaagatcctggatctgatcagcggcaatgcccacggcaaggatgtggacgccttcatcagactgaccgtggacgacatgctgaccgacaccgagcggagaatcaagagattcaaggacgaccggaagtccattcggagcgccgacaacaagatgggaaagagaggcttcaagcagatctccacaggcaagctggccgacttcctggccaaggacatcgtgctgtttcagcccagcgtgaacgatggcgagaacaagatcaccggcctgaactaccggatcatgcagagcgccattgccgtgtacgatagcggcgacgattacgaggccaagcagcagttcaagctgatgttcgagaaggcccggctgatcggcaagggcacaacagagcctcatccatttctgtacaaggtgttcgcccgcagcatccccgccaatgccgtcgagttctacgagcgctacctgatcgagcggaagttctacctgaccggcctgtccaacgagatcaagaaaggcaacagagtggatgtgcccttcatccggcgggaccagaacaagtggaaaacacccgccatgaagaccctgggcagaatctacagcgaggatctgcccgtggaactgcccagacagatgttcgacaatgagatcaagtcccacctgaagtccctgccacagatggaaggcatcgacttcaacaatgccaacgtgacctatctgatcgccgagtacatgaagagagtgctggacgacgacttccagaccttctaccagtggaaccgcaactaccggtacatggacatgcttaagggcgagtacgacagaaagggctccctgcagcactgcttcaccagcgtggaagagagagaaggcctctggaaagagcgggcctccagaacagagcggtacagaaagcaggccagcaacaagatccgcagcaaccggcagatgagaaacgccagcagcgaagagatcgagacaatcctggataagcggctgagcaacagccggaacgagtaccagaaaagcgagaaagtgatccggcgctacagagtgcaggatgccctgctgtttctgctggccaaaaagaccctgaccgaactggccgatttcgacggcgagaggttcaaactgaaagaaatcatgcccgacgccgagaagggaatcctgagcgagatcatgcccatgagcttcaccttcgagaaaggcggcaagaagtacaccatcaccagcgagggcatgaagctgaagaactacggcgacttctttgtgctggctagcgacaagaggatcggcaacctgctggaactcgtgggcagcgacatcgtgtccaaagaggatatcatggaagagttcaacaaatacgaccagtgcaggcccgagatcagctccatcgtgttcaacctggaaaagtgggccttcgacacataccccgagctgtctgccagagtggaccgggaagagaaggtggacttcaagagcatcctgaaaatcctgctgaacaacaagaacatcaacaaagagcagagcgacatcctgcggaagatccggaacgccttcgatcacaacaattaccccgacaaaggcgtggtggaaatcaaggccctgcctgagatcgccatgagcatcaagaaggcctttggggagtacgccatcatgaagtagtaatctagaacgcgttaagtcgacaatcaacctctggattacaaaatttgtgaaagattgactggtattcttaactatgttgctccttttacgctatgtggatacgctgctttaatgcctttgtatcatgctattgcttcccgtatggctttcattttctcctccttgtataaatcctggttgctgtctctttatgaggagttgtggcccgttgtcaggcaacgtggcgtggtgtgcactgtgtttgctgacgcaacccccactggttggggcattgccaccacctgtcagctcctttccgggactttcgctttccccctccctattgccacggcggaactcatcgccgcctgccttgcccgctgctggacaggggctcggctgttgggcactgacaattccgtggtgttgtcggggaaatcatcgtcctttccttggctgctcgcctgtgttgccacctggattctgcgcgggacgtccttctgctacgtcccttcggccctcaatccagcggaccttccttcccgcggcctgctgccggctctgcggcctcttccgcgtcttcgccttcgccctcagacgagtcggatctccctttgggccgcctccccgcgtcgactttaagaccaatgacttacaaggcagctgtagatcttagccactttttaaaagaaaaggggggactggaagggctaattcactcccaacgaagacaagatctgctttttgcttgtactgggtctctctggttagaccagatctgagcctgggagctctctggctaactagggaacccactgcttaagcctcaataaagcttgccttgagtgcttcaagtagtgtgtgcccgtctgttgtgtgactctggtaactagagatccctcagacccttttagtcagtgtggaaaatctctagcagggcccgtttaaacccgctgatcagcctcgactgtgccttctagttgccagccatctgttgtttgcccctcccccgtgccttccttgaccctggaaggtgccactcccactgtcctttcctaataaaatgaggaaattgcatcgcattgtctgagtaggtgtcattctattctggggggtggggtggggcaggacagcaagggggaggattgggaagacaatagcaggcatgctggggatgcggtgggctctatggcttctgaggcggaaagaaccagctggggctctagggggtatccccacgcgccctgtagcggcgcattaagcgcggcgggtgtggtggttacgcgcagcgtgaccgctacacttgccagcgccctagcgcccgctcctttcgctttcttcccttcctttctcgccacgttcgccggctttccccgtcaagctctaaatcgggggctccctttagggttccgatttagtgctttacggcacctcgaccccaaaaaacttgattagggtgatggttcacgtagtgggccatcgccctgatagacggtttttcgccctttgacgttggagtccacgttctttaatagtggactcttgttccaaactggaacaacactcaaccctatctcggtctattcttttgatttataagggattttgccgatttcggcctattggttaaaaaatgagctgatttaacaaaaatttaacgcgaattaattctgtggaatgtgtgtcagttagggtgtggaaagtccccaggctccccagcaggcagaagtatgcaaagcatgcatctcaattagtcagcaaccaggtgtggaaagtccccaggctccccagcaggcagaagtatgcaaagcatgcatctcaattagtcagcaaccatagtcccgcccctaactccgcccatcccgcccctaactccgcccagttccgcccattctccgccccatggctgactaattttttttatttatgcagaggccgaggccgcctctgcctctgagctattccagaagtagtgaggaggcttttttggaggcctaggcttttgcaaaaagctcccgggagcttgtatatccattttcggatctgatcagcacgtgttgacaattaatcatcggcatagtatatcggcatagtataatacgacaaggtgaggaactaaaccatggccaagttgaccagtgccgttccggtgctcaccgcgcgcgacgtcgccggagcggtcgagttctggaccgaccggctcgggttctcccgggacttcgtggaggacgacttcgccggtgtggtccgggacgacgtgaccctgttcatcagcgcggtccaggaccaggtggtgccggacaacaccctggcctgggtgtgggtgcgcggcctggacgagctgtacgccgagtggtcggaggtcgtgtccacgaacttccgggacgcctccgggccggccatgaccgagatcggcgagcagccgtgggggcgggagttcgccctgcgcgacccggccggcaactgcgtgcacttcgtggccgaggagcaggactgacacgtgctacgagatttcgattccaccgccgccttctatgaaaggttgggcttcggaatcgttttccgggacgccggctggatgatcctccagcgcggggatctcatgctggagttcttcgcccaccccaacttgtttattgcagcttataatggttacaaataaagcaatagcatcacaaatttcacaaataaagcatttttttcactgcattctagttgtggtttgtccaaactcatcaatgtatcttatcatgtctgtataccgtcgacctctagctagagcttggcgtaatcatggtcatagctgtttcctgtgtgaaattgttatccgctcacaattccacacaacatacgagccggaagcataaagtgtaaagcctggggtgcctaatgagtgagctaactcacattaattgcgttgcgctcactgcccgctttccagtcgggaaacctgtcgtgccagctgcattaatgaatcggccaacgcgcggggagaggcggtttgcgtattgggcgctcttccgcttcctcgctcactgactcgctgcgctcggtcgttcggctgcggcgagcggtatcagctcactcaaaggcggtaatacggttatccacagaatcaggggataacgcaggaaagaacatgtgagcaaaaggccagcaaaaggccaggaaccgtaaaaaggccgcgttgctggcgtttttccataggctccgcccccctgacgagcatcacaaaaatcgacgctcaagtcagaggtggcgaaacccgacaggactataaagataccaggcgtttccccctggaagctccctcgtgcgctctcctgttccgaccctgccgcttaccggatacctgtccgcctttctcccttcgggaagcgtggcgctttctcatagctcacgctgtaggtatctcagttcggtgtaggtcgttcgctccaagctgggctgtgtgcacgaaccccccgttcagcccgaccgctgcgccttatccggtaactatcgtcttgagtccaacccggtaagacacgacttatcgccactggcagcagccactggtaacaggattagcagagcgaggtatgtaggcggtgctacagagttcttgaagtggtggcctaactacggctacactagaagaacagtatttggtatctgcgctctgctgaagccagttaccttcggaaaaagagttggtagctcttgatccggcaaacaaaccaccgctggtagcggtggtttttttgtttgcaagcagcagattacgcgcagaaaaaaaggatctcaagaagatcctttgatcttttctacggggtctgacgctcagtggaacgaaaactcacgttaagggattttggtcatgagattatcaaaaaggatcttcacctagatccttttaaattaaaaatgaagttttaaatcaatctaaagtatatatgagtaaacttggtctgacagttaccaatgcttaatcagtgaggcacctatctcagcgatctgtctatttcgttcatccatagttgcctgactccccgtcgtgtagataactacgatacgggagggcttaccatctggccccagtgctgcaatgataccgcgagacccacgctcaccggctccagatttatcagcaataaaccagccagccggaagggccgagcgcagaagtggtcctgcaactttatccgcctccatccagtctattaattgttgccgggaagctagagtaagtagttcgccagttaatagtttgcgcaacgttgttgccattgctacaggcatcgtggtgtcacgctcgtcgtttggtatggcttcattcagctccggttcccaacgatcaaggcgagttacatgatcccccatgttgtgcaaaaaagcggttagctccttcggtcctccgatcgttgtcagaagtaagttggccgcagtgttatcactcatggttatggcagcactgcataattctcttactgtcatgccatccgtaagatgcttttctgtgactggtgagtactcaaccaagtcattctgagaatagtgtatgcggcgaccgagttgctcttgcccggcgtcaatacgggataataccgcgccacatagcagaactttaaaagtgctcatcattggaaaacgttcttcggggcgaaaactctcaaggatcttaccgctgttgagatccagttcgatgtaacccactcgtgcacccaactgatcttcagcatcttttactttcaccagcgtttctgggtgagcaaaaacaggaaggcaaaatgccgcaaaaaagggaataagggcgacacggaaatgttgaatactcatactcttcctttttcaatattattgaagcatttatcagggttattgtctcatgagcggatacatatttgaatgtatttagaaaaataaacaaataggggttccgcgcacatttccccgaaaagtgccacctgac

SEQ ID NO: 283 - DNA, 12213 bp, Artificial Sequence
  Chemically Synthesized
gtcgacggatcgggagatctcccgatcccctatggtgcactctcagtacaatctgctctgatgccgcatagttaagccagtatctgctccctgcttgtgtgttggaggtcgctgagtagtgcgcgagcaaaatttaagctacaacaaggcaaggcttgaccgacaattgcatgaagaatctgcttagggttaggcgttttgcgctgcttcgcgatgtacgggccagatatacgcgttgacattgattattgactagttattaatagtaatcaattacggggtcattagttcatagcccatatatggagttccgcgttacataacttacggtaaatggcccgcctggctgaccgcccaacgacccccgcccattgacgtcaataatgacgtatgttcccatagtaacgccaatagggactttccattgacgtcaatgggtggagtatttacggtaaactgcccacttggcagtacatcaagtgtatcatatgccaagtacgccccctattgacgtcaatgacggtaaatggcccgcctggcattatgcccagtacatgaccttatgggactttcctacttggcagtacatctacgtattagtcatcgctattaccatggtgatgcggttttggcagtacatcaatgggcgtggatagcggtttgactcacggggatttccaagtctccaccccattgacgtcaatgggagtttgttttggcaccaaaatcaacgggactttccaaaatgtcgtaacaactccgccccattgacgcaaatgggcggtaggcgtgtacggtgggaggtctatataagcagcgcgttttgcctgtactgggtctctctggttagaccagatctgagcctgggagctctctggctaactagggaacccactgcttaagcctcaataaagcttgccttgagtgcttcaagtagtgtgtgcccgtctgttgtgtgactctggtaactagagatccctcagacccttttagtcagtgtggaaaatctctagcagtggcgcccgaacagggacttgaaagcgaaagggaaaccagaggagctctctcgacgcaggactcggcttgctgaagcgcgcacggcaagaggcgaggggcggcgactggtgagtacgccaaaaattttgactagcggaggctagaaggagagagatgggtgcgagagcgtcagtattaagcgggggagaattagatcgcgatgggaaaaaattcggttaaggccagggggaaagaaaaaatataaattaaaacatatagtatgggcaagcagggagctagaacgattcgcagttaatcctggcctgttagaaacatcagaaggctgtagacaaatactgggacagctacaaccatcccttcagacaggatcagaagaacttagatcattatataatacagtagcaaccctctattgtgtgcatcaaaggatagagataaaagacaccaaggaagctttagacaagatagaggaagagcaaaacaaaagtaagaccaccgcacagcaagcggccgctgatcttcagacctggaggaggagatatgagggacaattggagaagtgaattatataaatataaagtagtaaaaattgaaccattaggagtagcacccaccaaggcaaagagaagagtggtgcagagagaaaaaagagcagtgggaataggagctttgttccttgggttcttgggagcagcaggaagcactatgggcgcagcgtcaatgacgctgacggtacaggccagacaattattgtctggtatagtgcagcagcagaacaatttgctgagggctattgaggcgcaacagcatctgttgcaactcacagtctggggcatcaagcagctccaggcaagaatcctggctgtggaaagatacctaaaggatcaacagctcctggggatttggggttgctctggaaaactcatttgcaccactgctgtgccttggaatgctagttggagtaataaatctctggaacagatttggaatcacacgacctggatggagtgggacagagaaattaacaattacacaagcttaatacactccttaattgaagaatcgcaaaaccagcaagaaaagaatgaacaagaattattggaattagataaatgggcaagtttgtggaattggtttaacataacaaattggctgtggtatataaaattattcataatgatagtaggaggcttggtaggtttaagaatagtttttgctgtactttctatagtgaatagagttaggcagggatattcaccattatcgtttcagacccacctcccaaccccgaggggacccgacaggcccgaaggaatagaagaagaaggtggagagagagacagagacagatccattcgattagtgaacggatcggcactgcgtgcgccaattctgcagacaaatggcagtattcatccacaattttaaaagaaaaggggggattggggggtacagtgcaggggaaagaatagtagacataatagcaacagacatacaaactaaagaattacaaaaacaaattacaaaaattcaaaattttcgggtttattacagggacagcagagatccagtttggttaattaaggtaccgagggcctatttcccatgattccttcatatttgcatatacgatacaaggctgttagagagataattagaattaatttgactgtaaacacaaagatattagtacaaaatacgtgacgtagaaagtaataatttcttgggtagtttgcagttttaaaattatgttttaaaatggactatcatatgcttaccgtaacttgaaagtatttcgatttcttggctttatatatcttgtggaaaggacgaaacaccgagatcgaaagttggttggtttgttacctggttgtggaaggtccagtcttgaggggctattacaacgttcccgaaggtgtgacttccatgccaatggttgtggaaggtccagctttgaggggctattacaacgcgtggcctcggtgaaaatgtggtggctctgttgtggaaggtccagttttgaggggctattacaactttttttgaattcacatcgatatctagaggtacccgttacataacttacggtaaatggcccgcctggctgaccgcccaacgacccccgcccattgacgtcaatagtaacgccaatagggactttccattgacgtcaatgggtggagtatttacggtaaactgcccacttggcagtacatcaagtgtatcatatgccaagtacgccccctattgacgtcaatgacggtaaatggcccgcctggcattgtgcccagtacatgaccttatgggactttcctacttggcagtacatctacgtattagtcatcgctattaccatggtcgaggtgagccccacgttctgcttcactctccccatctcccccccctccccacccccaattttgtatttatttattttttaattattttgtgcagcgatgggggcggggggggggggggggcggggcgaggggcggggcggggcgaggcggagaggtgcggcggcagccaatcagagcggcgcgctccgaaagtttccttttatggcgaggcggcggcggcggcggccctataaaaagcgaagcgcgcggcgggcgggagtcgctgcgcgctgccttcgccccgtgccccgctccgccgccgcctcgcgccgcccgccccggctctgactgaccgcgttactcccacaggtgagcgggcgggacggcccttctcctccgggctgtaattagctgagcaagaggtaagggtttaagggatggttggttggtggggtattaatgtttaattacctggagcacctgcctgaaatcactttttttcaggttggaccggtacatcgatactcgagcgccaccatggactacaaagaccatgacggtgattataaagatcatgacatcgattacaaggatgacgatgacaagggatcccttcaactgcctccacttgaaagactgacactgggtagttccaacatccccgctctggtggaaaaccagaagaagtactttggcacctacagcgtgatggccatgctgaacgctcagaccgtgctggaccacatccagaaggtggccgatattgagggcgagcagaacgagaacaacgagaatctgtggtttcaccccgtgatgagccacctgtacaacgccaagaacggctacgacaagcagcccgagaaaaccatgttcatcatcgagcggctgcagagctacttcccattcctgaagatcatggccgagaaccagagagagtacagcaacggcaagtacaagcagaaccgcgtggaagtgaacagcaacgacatcttcgaggtgctgaagcgcgccttcggcgtgctgaagatgtacagggacctgaccaaccactacaagacctacgaggaaaagctgaacgacggctgcgagttcctgaccagcacagagcaacctctgagcggcatgatcaacaactactacacagtggccctgcggaacatgaacgagagatacggctacaagacagaggacctggccttcatccaggacaagcggttcaagttcgtgaaggacgcctacggcaagaaaaagtcccaagtgaataccggattcttcctgagcctgcaggactacaacggcgacacacagaagaagctgcacctgagcggagtgggaatcgccctgctgatctgcctgttcctggacaagcagtacatcaacatctttctgagcaggctgcccatcttctccagctacaatgcccagagcgaggaacggcggatcatcatcagatccttcggcatcaacagcatcaagctgcccaaggaccggatccacagcgagaagtccaacaagagcgtggccatggatatgctcaacgaagtgaagcggtgccccgacgagctgttcacaacactgtctgccgagaagcagtcccggttcagaatcatcagcgacgaccacaatgaagtgctgatgaagcggagcagcgacagattcgtgcctctgctgctgcagtatatcgattacggcaagctgttcgaccacatcaggttccacgtgaacatgggcaagctgagatacctgctgaaggccgacaagacctgcatcgacggccagaccagagtcagagtgatcgagcagcccctgaacggcttcggcagactggaagaggccgagacaatgcggaagcaagagaacggcaccttcggcaacagcggcatccggatcagagacttcgagaacatgaagcgggacgacgccaatcctgccaactatccctacatcgtggacacctacacacactacatcctggaaaacaacaaggtcgagatgtttatcaacgacaaagaggacagcgccccactgctgcccgtgatcgaggatgatagatacgtggtcaagacaatccccagctgccggatgagcaccctggaaattccagccatggccttccacatgtttctgttcggcagcaagaaaaccgagaagctgatcgtggacgtgcacaaccggtacaagagactgttccaggccatgcagaaagaagaagtgaccgccgagaatatcgccagcttcggaatcgccgagagcgacctgcctcagaagatcctggatctgatcagcggcaatgcccacggcaaggatgtggacgccttcatcagactgaccgtggacgacatgctgaccgacaccgagcggagaatcaagagattcaaggacgaccggaagtccattcggagcgccgacaacaagatgggaaagagaggcttcaagcagatctccacaggcaagctggccgacttcctggccaaggacatcgtgctgtttcagcccagcgtgaacgatggcgagaacaagatcaccggcctgaactaccggatcatgcagagcgccattgccgtgtacgatagcggcgacgattacgaggccaagcagcagttcaagctgatgttcgagaaggcccggctgatcggcaagggcacaacagagcctcatccatttctgtacaaggtgttcgcccgcagcatccccgccaatgccgtcgagttctacgagcgctacctgatcgagcggaagttctacctgaccggcctgtccaacgagatcaagaaaggcaacagagtggatgtgcccttcatccggcgggaccagaacaagtggaaaacacccgccatgaagaccctgggcagaatctacagcgaggatctgcccgtggaactgcccagacagatgttcgacaatgagatcaagtcccacctgaagtccctgccacagatggaaggcatcgacttcaacaatgccaacgtgacctatctgatcgccgagtacatgaagagagtgctggacgacgacttccagaccttctaccagtggaaccgcaactaccggtacatggacatgcttaagggcgagtacgacagaaagggctccctgcagcactgcttcaccagcgtggaagagagagaaggcctctggaaagagcgggcctccagaacagagcggtacagaaagcaggccagcaacaagatccgcagcaaccggcagatgagaaacgccagcagcgaagagatcgagacaatcctggataagcggctgagcaacagccggaacgagtaccagaaaagcgagaaagtgatccggcgctacagagtgcaggatgccctgctgtttctgctggccaaaaagaccctgaccgaactggccgatttcgacggcgagaggttcaaactgaaagaaatcatgcccgacgccgagaagggaatcctgagcgagatcatgcccatgagcttcaccttcgagaaaggcggcaagaagtacaccatcaccagcgagggcatgaagctgaagaactacggcgacttctttgtgctggctagcgacaagaggatcggcaacctgctggaactcgtgggcagcgacatcgtgtccaaagaggatatcatggaagagttcaacaaatacgaccagtgcaggcccgagatcagctccatcgtgttcaacctggaaaagtgggccttcgacacataccccgagctgtctgccagagtggaccgggaagagaaggtggacttcaagagcatcctgaaaatcctgctgaacaacaagaacatcaacaaagagcagagcgacatcctgcggaagatccggaacgccttcgatcacaacaattaccccgacaaaggcgtggtggaaatcaaggccctgcctgagatcgccatgagcatcaagaaggcctttggggagtacgccatcatgaagtagtaatctagaacgcgttaagtcgacaatcaacctctggattacaaaatttgtgaaagattgactggtattcttaactatgttgctccttttacgctatgtggatacgctgctttaatgcctttgtatcatgctattgcttcccgtatggctttcattttctcctccttgtataaatcctggttgctgtctctttatgaggagttgtggcccgttgtcaggcaacgtggcgtggtgtgcactgtgtttgctgacgcaacccccactggttggggcattgccaccacctgtcagctcctttccgggactttcgctttccccctccctattgccacggcggaactcatcgccgcctgccttgcccgctgctggacaggggctcggctgttgggcactgacaattccgtggtgttgtcggggaaatcatcgtcctttccttggctgctcgcctgtgttgccacctggattctgcgcgggacgtccttctgctacgtcccttcggccctcaatccagcggaccttccttcccgcggcctgctgccggctctgcggcctcttccgcgtcttcgccttcgccctcagacgagtcggatctccctttgggccgcctccccgcgtcgactttaagaccaatgacttacaaggcagctgtagatcttagccactttttaaaagaaaaggggggactggaagggctaattcactcccaacgaagacaagatctgctttttgcttgtactgggtctctctggttagaccagatctgagcctgggagctctctggctaactagggaacccactgcttaagcctcaataaagcttgccttgagtgcttcaagtagtgtgtgcccgtctgttgtgtgactctggtaactagagatccctcagacccttttagtcagtgtggaaaatctctagcagggcccgtttaaacccgctgatcagcctcgactgtgccttctagttgccagccatctgttgtttgcccctcccccgtgccttccttgaccctggaaggtgccactcccactgtcctttcctaataaaatgaggaaattgcatcgcattgtctgagtaggtgtcattctattctggggggtggggtggggcaggacagcaagggggaggattgggaagacaatagcaggcatgctggggatgcggtgggctctatggcttctgaggcggaaagaaccagctggggctctagggggtatccccacgcgccctgtagcggcgcattaagcgcggcgggtgtggtggttacgcgcagcgtgaccgctacacttgccagcgccctagcgcccgctcctttcgctttcttcccttcctttctcgccacgttcgccggctttccccgtcaagctctaaatcgggggctccctttagggttccgatttagtgctttacggcacctcgaccccaaaaaacttgattagggtgatggttcacgtagtgggccatcgccctgatagacggtttttcgccctttgacgttggagtccacgttctttaatagtggactcttgttccaaactggaacaacactcaaccctatctcggtctattcttttgatttataagggattttgccgatttcggcctattggttaaaaaatgagctgatttaacaaaaatttaacgcgaattaattctgtggaatgtgtgtcagttagggtgtggaaagtccccaggctccccagcaggcagaagtatgcaaagcatgcatctcaattagtcagcaaccaggtgtggaaagtccccaggctccccagcaggcagaagtatgcaaagcatgcatctcaattagtcagcaaccatagtcccgcccctaactccgcccatcccgcccctaactccgcccagttccgcccattctccgccccatggctgactaattttttttatttatgcagaggccgaggccgcctctgcctctgagctattccagaagtagtgaggaggcttttttggaggcctaggcttttgcaaaaagctcccgggagcttgtatatccattttcggatctgatcagcacgtgttgacaattaatcatcggcatagtatatcggcatagtataatacgacaaggtgaggaactaaaccatggccaagttgaccagtgccgttccggtgctcaccgcgcgcgacgtcgccggagcggtcgagttctggaccgaccggctcgggttctcccgggacttcgtggaggacgacttcgccggtgtggtccgggacgacgtgaccctgttcatcagcgcggtccaggaccaggtggtgccggacaacaccctggcctgggtgtgggtgcgcggcctggacgagctgtacgccgagtggtcggaggtcgtgtccacgaacttccgggacgcctccgggccggccatgaccgagatcggcgagcagccgtgggggcgggagttcgccctgcgcgacccggccggcaactgcgtgcacttcgtggccgaggagcaggactgacacgtgctacgagatttcgattccaccgccgccttctatgaaaggttgggcttcggaatcgttttccgggacgccggctggatgatcctccagcgcggggatctcatgctggagttcttcgcccaccccaacttgtttattgcagcttataatggttacaaataaagcaatagcatcacaaatttcacaaataaagcatttttttcactgcattctagttgtggtttgtccaaactcatcaatgtatcttatcatgtctgtataccgtcgacctctagctagagcttggcgtaatcatggtcatagctgtttcctgtgtgaaattgttatccgctcacaattccacacaacatacgagccggaagcataaagtgtaaagcctggggtgcctaatgagtgagctaactcacattaattgcgttgcgctcactgcccgctttccagtcgggaaacctgtcgtgccagctgcattaatgaatcggccaacgcgcggggagaggcggtttgcgtattgggcgctcttccgcttcctcgctcactgactcgctgcgctcggtcgttcggctgcggcgagcggtatcagctcactcaaaggcggtaatacggttatccacagaatcaggggataacgcaggaaagaacatgtgagcaaaaggccagcaaaaggccaggaaccgtaaaaaggccgcgttgctggcgtttttccataggctccgcccccctgacgagcatcacaaaaatcgacgctcaagtcagaggtggcgaaacccgacaggactataaagataccaggcgtttccccctggaagctccctcgtgcgctctcctgttccgaccctgccgcttaccggatacctgtccgcctttctcccttcgggaagcgtggcgctttctcatagctcacgctgtaggtatctcagttcggtgtaggtcgttcgctccaagctgggctgtgtgcacgaaccccccgttcagcccgaccgctgcgccttatccggtaactatcgtcttgagtccaacccggtaagacacgacttatcgccactggcagcagccactggtaacaggattagcagagcgaggtatgtaggcggtgctacagagttcttgaagtggtggcctaactacggctacactagaagaacagtatttggtatctgcgctctgctgaagccagttaccttcggaaaaagagttggtagctcttgatccggcaaacaaaccaccgctggtagcggtggtttttttgtttgcaagcagcagattacgcgcagaaaaaaaggatctcaagaagatcctttgatcttttctacggggtctgacgctcagtggaacgaaaactcacgttaagggattttggtcatgagattatcaaaaaggatcttcacctagatccttttaaattaaaaatgaagttttaaatcaatctaaagtatatatgagtaaacttggtctgacagttaccaatgcttaatcagtgaggcacctatctcagcgatctgtctatttcgttcatccatagttgcctgactccccgtcgtgtagataactacgatacgggagggcttaccatctggccccagtgctgcaatgataccgcgagacccacgctcaccggctccagatttatcagcaataaaccagccagccggaagggccgagcgcagaagtggtcctgcaactttatccgcctccatccagtctattaattgttgccgggaagctagagtaagtagttcgccagttaatagtttgcgcaacgttgttgccattgctacaggcatcgtggtgtcacgctcgtcgtttggtatggcttcattcagctccggttcccaacgatcaaggcgagttacatgatcccccatgttgtgcaaaaaagcggttagctccttcggtcctccgatcgttgtcagaagtaagttggccgcagtgttatcactcatggttatggcagcactgcataattctcttactgtcatgccatccgtaagatgcttttctgtgactggtgagtactcaaccaagtcattctgagaatagtgtatgcggcgaccgagttgctcttgcccggcgtcaatacgggataataccgcgccacatagcagaactttaaaagtgctcatcattggaaaacgttcttcggggcgaaaactctcaaggatcttaccgctgttgagatccagttcgatgtaacccactcgtgcacccaactgatcttcagcatcttttactttcaccagcgtttctgggtgagcaaaaacaggaaggcaaaatgccgcaaaaaagggaataagggcgacacggaaatgttgaatactcatactcttcctttttcaatattattgaagcatttatcagggttattgtctcatgagcggatacatatttgaatgtatttagaaaaataaacaaataggggttccgcgcacatttccccgaaaagtgccacctgac

SEQ ID NO: 284 - DNA, 6459 bp, Artificial Sequence
  Chemically Synthesized
ggcgcccctgcaggcagctgcgcgctcgctcgctcactgaggccgcccgggcaaagcccgggcgtcgggcgacctttggtcgcccggcctcagtgagcgagcgagcgcgcagagagggagtggccaactccatcactaggggttcctgcggccgcggtaccgagggcctatttcccatgattccttcatatttgcatatacgatacaaggctgttagagagataattagaattaatttgactgtaaacacaaagatattagtacaaaatacgtgacgtagaaagtaataatttcttgggtagtttgcagttttaaaattatgttttaaaatggactatcatatgcttaccgtaacttgaaagtatttcgatttcttggctttatatatcttgtggaaaggacgaaacaccgagatcgaaagttggttggtttgttacctggttgtggaaggtccagtcttgaggggctattacaacgttcccgaaggtgtgacttccatgccaatggttgtggaaggtccagctttgaggggctattacaacgcgtggcctcggtgaaaatgtggtggctctgttgtggaaggtccagttttgaggggctattacaactttttttgaattcgctagctaggtcttgaaaggagtgggaattggctccggtgcccgtcagtgggcagagcgcacatcgcccacagtccccgagaagttggggggaggggtcggcaattgatccggtgcctagagaaggtggcgcggggtaaactgggaaagtgatgtcgtgtactggctccgcctttttcccgagggtgggggagaaccgtatataagtgcagtagtcgccgtgaacgttctttttcgcaacgggtttgccgccagaacacaggctcgagcgccaccatggactacaaagaccatgacggtgattataaagatcatgacatcgattacaaggatgacgatgacaagggatcccttcaactgcctccacttgaaagactgacactgggtagttccaacatccccgctctggtggaaaaccagaagaagtactttggcacctacagcgtgatggccatgctgaacgctcagaccgtgctggaccacatccagaaggtggccgatattgagggcgagcagaacgagaacaacgagaatctgtggtttcaccccgtgatgagccacctgtacaacgccaagaacggctacgacaagcagcccgagaaaaccatgttcatcatcgagcggctgcagagctacttcccattcctgaagatcatggccgagaaccagagagagtacagcaacggcaagtacaagcagaaccgcgtggaagtgaacagcaacgacatcttcgaggtgctgaagcgcgccttcggcgtgctgaagatgtacagggacctgaccaaccactacaagacctacgaggaaaagctgaacgacggctgcgagttcctgaccagcacagagcaacctctgagcggcatgatcaacaactactacacagtggccctgcggaacatgaacgagagatacggctacaagacagaggacctggccttcatccaggacaagcggttcaagttcgtgaaggacgcctacggcaagaaaaagtcccaagtgaataccggattcttcctgagcctgcaggactacaacggcgacacacagaagaagctgcacctgagcggagtgggaatcgccctgctgatctgcctgttcctggacaagcagtacatcaacatctttctgagcaggctgcccatcttctccagctacaatgcccagagcgaggaacggcggatcatcatcagatccttcggcatcaacagcatcaagctgcccaaggaccggatccacagcgagaagtccaacaagagcgtggccatggatatgctcaacgaagtgaagcggtgccccgacgagctgttcacaacactgtctgccgagaagcagtcccggttcagaatcatcagcgacgaccacaatgaagtgctgatgaagcggagcagcgacagattcgtgcctctgctgctgcagtatatcgattacggcaagctgttcgaccacatcaggttccacgtgaacatgggcaagctgagatacctgctgaaggccgacaagacctgcatcgacggccagaccagagtcagagtgatcgagcagcccctgaacggcttcggcagactggaagaggccgagacaatgcggaagcaagagaacggcaccttcggcaacagcggcatccggatcagagacttcgagaacatgaagcgggacgacgccaatcctgccaactatccctacatcgtggacacctacacacactacatcctggaaaacaacaaggtcgagatgtttatcaacgacaaagaggacagcgccccactgctgcccgtgatcgaggatgatagatacgtggtcaagacaatccccagctgccggatgagcaccctggaaattccagccatggccttccacatgtttctgttcggcagcaagaaaaccgagaagctgatcgtggacgtgcacaaccggtacaagagactgttccaggccatgcagaaagaagaagtgaccgccgagaatatcgccagcttcggaatcgccgagagcgacctgcctcagaagatcctggatctgatcagcggcaatgcccacggcaaggatgtggacgccttcatcagactgaccgtggacgacatgctgaccgacaccgagcggagaatcaagagattcaaggacgaccggaagtccattcggagcgccgacaacaagatgggaaagagaggcttcaagcagatctccacaggcaagctggccgacttcctggccaaggacatcgtgctgtttcagcccagcgtgaacgatggcgagaacaagatcaccggcctgaactaccggatcatgcagagcgccattgccgtgtacgatagcggcgacgattacgaggccaagcagcagttcaagctgatgttcgagaaggcccggctgatcggcaagggcacaacagagcctcatccatttctgtacaaggtgttcgcccgcagcatccccgccaatgccgtcgagttctacgagcgctacctgatcgagcggaagttctacctgaccggcctgtccaacgagatcaagaaaggcaacagagtggatgtgcccttcatccggcgggaccagaacaagtggaaaacacccgccatgaagaccctgggcagaatctacagcgaggatctgcccgtggaactgcccagacagatgttcgacaatgagatcaagtcccacctgaagtccctgccacagatggaaggcatcgacttcaacaatgccaacgtgacctatctgatcgccgagtacatgaagagagtgctggacgacgacttccagaccttctaccagtggaaccgcaactaccggtacatggacatgcttaagggcgagtacgacagaaagggctccctgcagcactgcttcaccagcgtggaagagagagaaggcctctggaaagagcgggcctccagaacagagcggtacagaaagcaggccagcaacaagatccgcagcaaccggcagatgagaaacgccagcagcgaagagatcgagacaatcctggataagcggctgagcaacagccggaacgagtaccagaaaagcgagaaagtgatccggcgctacagagtgcaggatgccctgctgtttctgctggccaaaaagaccctgaccgaactggccgatttcgacggcgagaggttcaaactgaaagaaatcatgcccgacgccgagaagggaatcctgagcgagatcatgcccatgagcttcaccttcgagaaaggcggcaagaagtacaccatcaccagcgagggcatgaagctgaagaactacggcgacttctttgtgctggctagcgacaagaggatcggcaacctgctggaactcgtgggcagcgacatcgtgtccaaagaggatatcatggaagagttcaacaaatacgaccagtgcaggcccgagatcagctccatcgtgttcaacctggaaaagtgggccttcgacacataccccgagctgtctgccagagtggaccgggaagagaaggtggacttcaagagcatcctgaaaatcctgctgaacaacaagaacatcaacaaagagcagagcgacatcctgcggaagatccggaacgccttcgatcacaacaattaccccgacaaaggcgtggtggaaatcaaggccctgcctgagatcgccatgagcatcaagaaggcctttggggagtacgccatcatgaagtagtaatctagaaattcctagagctcgctgatcagcctcgactgtgccttctagttgccagccatctgttgtttgcccctcccccgtgccttccttgaccctggaaggtgccactcccactgtcctttcctaataaaatgaggaaattgcatcgcattgtctgagtaggtgtcattctattctggggggtggggtggggcaggacagcaagggggaggattgggaagagaatagcaggcatgctggggagctagaggccgcaggaacccctagtgatggagttggccactccctctctgcgcgctcgctcgctcactgaggccgggcgaccaaaggtcgcccgacgcccgggcggcctcagtgagcgagcgagcgcgcagctgcctgcaggacatgtatagctagactgggcggttttatggacagcaagcgaacgcggaacccctatttgtttatttttctaaatacattcaaatatgtatccgctcatgagacaataaccctgataaatgcttcaataatattgaaaaaggaagagtatgagtattcaacatttccgtgtcgcccttattcccttttttgcggcattttgccttcctgtttttgctcacccagaaacgctggtgaaagtaaaagatgctgaagatcagttgggtgcacgagtgggttacatcgaactggatctcaacagcggtaagatccttgagagttttcgccccgaagaacgttttccaatgatgagcacttttaaagttctgctatgtggcgcggtattatcccgtattgacgccgggcaagagcaactcggtcgccgcatacactattctcagaatgacttggttgagtactcaccagtcacagaaaagcatcttacggatggcatgacagtaagagaattatgcagtgctgccataaccatgagtgataacactgcggccaacttacttctgacaacgatcggaggaccgaaggagctaaccgcttttttgcacaacatgggggatcatgtaactcgccttgatcgttgggaaccggagctgaatgaagccataccaaacgacgagcgtgacaccacgatgcctgtagcaatggcaacaacgttgcgcaaactattaactggcgaactacttactctagcttcccggcaacaattaatagactggatggaggcggataaagttgcaggaccacttctgcgctcggcccttccggctggctggtttattgctgataaatctggagccggtgagcgtgggtctcgcggtatcattgcagcactggggccagatggtaagccctcccgtatcgtagttatctacacgacggggagtcaggcaactatggatgaacgaaatagacagatcgctgagataggtgcctcactgattaagcattggtaactttagattgatttaaaacttcatttttaatttaaaaggatctaggtgaagatcctttttgataatctcatgaccaaaatcccttaacgtgagttttcgttccactgagcgtcagaccccgtagaaaagatcaaaggatcttcttgagatcctttttttctgcgcgtaatctgctgcttgcaaacaaaaaaaccaccgctaccagcggtggtttgtttgccggatcaagagctaccaactctttttccgaaggtaactggcttcagcagagcgcagataccaaatactgttcttctagtgtagccgtagttaggccaccacttcaagaactctgtagcaccgcctacatacctcgctctgctaatcctgttaccagtggctgctgccagtggcgataagtcgtgtcttaccgggttggactcaagacgatagttaccggataaggcgcagcggtcgggctgaacggggggttcgtgcacacagcccagcttggagcgaacgacctacaccgaactgagatacctacagcgtgagctatgagaaagcgccacgcttcccgaagggagaaaggcggacaggtatccggtaagcggcagggtcggaacaggagagcgcacgagggagcttccagggggaaacgcctggtatctttatagtcctgtcgggtttcgccacctctgacttgagcgtcgatttttgtgatgctcgtcaggggggcggagcctatggaaaaacgccagcaacgcggcctttttacggttcctggccttttgctggaa

SEQ ID NO: 285 - DNA, 2153 bp, Artificial Sequence
  Chemically Synthesized
tgcatctcaattagtcagcaaccatagtcccgcccctaactccgcccatcccgcccctaactccgcccagttccgcccattctccgccccatcgctgactaattttttttatttatgcagaggccgaggccgcctcggcctctgagctattccagaagtagtgaggaggcttttttggaggcctaggcttttgcaaaaagcttggcattccggtactgttggtaaagccaccatggaagacgccaaaaacataaagaaaggcccggcgccattctatccgctggaagatggaaccgctggagagcaactgcataaggctatgaagagatacgccctggttcctggaacaattgcttttacagatgcacatatcgaggtggacatcacttacgctgagtacttcgaaatgtccgttcggttggcagaagctatgaaacgatatgggctgaatacaaatcacagaatcgtcgtatgcagtgaaaactctcttcaattctttatgccggtgttgggcgcgttatttatcggagttgcagttgcgcccgcgaacgacatttataatgaacgtgaattgctcaacagtatgggcatttcgcagcctaccgtggtgttcgtttccaaaaaggggttgcaaaaaattttgaacgtgcaaaaaaagctcccaatcatccaaaaaattattatcatggattctaaaacggattaccagggatttcagtcgatgtacacgttcgtcacatctcatctacctcccggttttaatgaatacgattttgtgccagagtccttcgatagggacaagacaattgcactgatcatgaactcctctggatctactggtctgcctaaaggtgtcgctctgcctcatagaactgcctgcgtgagattctcgcatgccagagatcctatttttggcaatcaaatcattccggatactgcgattttaagtgttgttccattccatcacggttttggaatgtttactacactcggatatttgatatgtggatttcgagtcgtcttaatgtatagatttgaagaagagctgtttctgaggagccttcaggattacaagattcaaagtgcgctgctggtgccaaccctattctccttcttcgccaaaagcactctgattgacaaatacgatttatctaatttacacgaaattgcttctggtggcgctcccctctctaaggaagtcggggaagcggttgccaagaggttccatctgccaggtatcaggcaaggatatgggctcactgagactacatcagctattctgattacacccgagggggatgataaaccgggcgcggtcggtaaagttgttccattttttgaagcgaaggttgtggatctggataccgggaaaacgctgggcgttaatcaaagaggcgaactgtgtgtgagaggtcctatgattatgtccggttatgtaaacaatccggaagcgaccaacgccttgattgacaaggatggatggctacattctggagacatagcttactgggacgaagacgaacacttcttcatcgttgaccgcctgaagtctctgattaagtacaaaggctatcaggtggctcccgctgaattggaatccatcttgctccaacaccccaacatcttcgacgcaggtgtcgcaggtcttcccgacgatgacgccggtgaacttcccgccgccgttgttgttttggagcacggaaagacgatgacggaaaaagagatcgtggattacgtcgccagtcaagtaacaaccgcgaaaaagttgcgcggaggagttgtgtttgtggacgaagtaccgaaaggtcttaccggaaaactcgacgcaagaaaaatcagagagatcctcataaaggccaagaagggcggaaagatcgccgtgtaattctagagtcggggcggccggccgcttcgagcagacatgataagatacattgatgagtttggacaaaccacaactagaatgcagtgaaaaaaatgctttatttgtgaaatttgtgatgctattgctttatttgtaaccattataagctgcaataaacaagttaacaacaacaattgcattcattttatgtttcaggttcagggggaggtgtgggaggttttttaaagcaagtaaaacctctacaaatgtggtaaaatcgataaggatc

SEQ ID NO: 286 - DNA, 2394 bp, Artificial Sequence
  Chemically Synthesized
tgcatctcaattagtcagcaaccatagtcccgcccctaactccgcccatcccgcccctaactccgcccagttccgcccattctccgccccatcgctgactaattttttttatttatgcagaggccgaggccgcctcggcctctgagctattccagaagtagtgaggaggcttttttggaggcctaggcttttgcaaaaagcttggcattccggtactgttggtaaagccaccatggaagacgccaaaaacataaagaaaggcccggcgccattctatccgctggaagatggaaccgctggagagcaactgcataaggctatgaagagatacgccctggttcctggaacaattgcttttacagatgcacatatcgaggtggacatcacttacgctgagtacttcgaaatgtccgttcggttggcagaagctatgaaacgatatgggctgaatacaaatcacagaatcgtcgtatgcagtgaaaactctcttcaattctttatgccggtgttgggcgcgttatttatcggagttgcagttgcgcccgcgaacgacatttataatgaacgtgaattgctcaacagtatgggcatttcgcagcctaccgtggtgttcgtttccaaaaaggggttgcaaaaaattttgaacgtgcaaaaaaagctcccaatcatccaaaaaattattatcatggattctaaaacggattaccagggatttcagtcgatgtacacgttcgtcacatctcatctacctcccggttttaatgaatacgattttgtgccagagtccttcgatagggacaagacaattgcactgatcatgaactcctctggatctactggtctgcctaaaggtgtcgctctgcctcatagaactgcctgcgtgagattctcgcatgccagagatcctatttttggcaatcaaatcattccggatactgcgattttaagtgttgttccattccatcacggttttggaatgtttactacactcggatatttgatatgtggatttcgagtcgtcttaatgtatagatttgaagaagagctgtttctgaggagccttcaggattacaagattcaaagtgcgctgctggtgccaaccctattctccttcttcgccaaaagcactctgattgacaaatacgatttatctaatttacacgaaattgcttctggtggcgctcccctctctaaggaagtcggggaagcggttgccaagaggttccatctgccaggtatcaggcaaggatatgggctcactgagactacatcagctattctgattacacccgagggggatgataaaccgggcgcggtcggtaaagttgttccattttttgaagcgaaggttgtggatctggataccgggaaaacgctgggcgttaatcaaagaggcgaactgtgtgtgagaggtcctatgattatgtccggttatgtaaacaatccggaagcgaccaacgccttgattgacaaggatggatggctacattctggagacatagcttactgggacgaagacgaacacttcttcatcgttgaccgcctgaagtctctgattaagtacaaaggctatcaggtggctcccgctgaattggaatccatcttgctccaacaccccaacatcttcgacgcaggtgtcgcaggtcttcccgacgatgacgccggtgaacttcccgccgccgttgttgttttggagcacggaaagacgatgacggaaaaagagatcgtggattacgtcgccagtcaagtaacaaccgcgaaaaagttgcgcggaggagttgtgtttgtggacgaagtaccgaaaggtcttaccggaaaactcgacgcaagaaaaatcagagagatcctcataaaggccaagaagggcggaaagatcgccgtgtaattctagagtcggggcggccggccgcttcgagcagacatgataagatacattgatgagtttggacaaaccacaactagaatgcagtgaaaaaaatgctttatttgtgaaatttgtgatgctattgctttatttgtaaccattataagctgcaataaacaagttaacaacaacaattgcattcattttatgtttcaggttcagggggaggtgtgggaggttttttaaagcaagtaaaacctctacaaatgtggtaaaatcgataaggatctgaacgatggagcggagaatgggcggaactgggcggagttaggggcgggatgggcggagttaggggcgggactatggttgctgactaattgagatgcatgctttgcatacttctgcctgctggggagcctggggactttccacacctggttgctgactaattgagatgcatgctttgcatacttctgcctgctggggagcctggggactttccacaccctaactgacacacattccacagc

SEQ ID NO: 287 - DNA, 2565 bp, Artificial Sequence
  Chemically Synthesized
tgcatctcaattagtcagcaaccatagtcccgcccctaactccgcccatcccgcccctaactccgcccagttccgcccattctccgccccatcgctgactaattttttttatttatgcagaggccgaggccgcctcggcctctgagctattccagaagtagtgaggaggcttttttggaggcctaggcttttgcaaaaagcttggcattccggtactgttggtaaagccaccatggaagacgccaaaaacataaagaaaggcccggcgccattctatccgctggaagatggaaccgctggagagcaactgcataaggctatgaagagatacgccctggttcctggaacaattgcttttacagatgcacatatcgaggtggacatcacttacgctgagtacttcgaaatgtccgttcggttggcagaagctatgaaacgatatgggctgaatacaaatcacagaatcgtcgtatgcagtgaaaactctcttcaattctttatgccggtgttgggcgcgttatttatcggagttgcagttgcgcccgcgaacgacatttataatgaacgtgaattgctcaacagtatgggcatttcgcagcctaccgtggtgttcgtttccaaaaaggggttgcaaaaaattttgaacgtgcaaaaaaagctcccaatcatccaaaaaattattatcatggattctaaaacggattaccagggatttcagtcgatgtacacgttcgtcacatctcatctacctcccggttttaatgaatacgattttgtgccagagtccttcgatagggacaagacaattgcactgatcatgaactcctctggatctactggtctgcctaaaggtgtcgctctgcctcatagaactgcctgcgtgagattctcgcatgccagagatcctatttttggcaatcaaatcattccggatactgcgattttaagtgttgttccattccatcacggttttggaatgtttactacactcggatatttgatatgtggatttcgagtcgtcttaatgtatagatttgaagaagagctgtttctgaggagccttcaggattacaagattcaaagtgcgctgctggtgccaaccctattctccttcttcgccaaaagcactctgattgacaaatacgatttatctaatttacacgaaattgcttctggtggcgctcccctctctaaggaagtcggggaagcggttgccaagaggttccatctgccaggtatcaggcaaggatatgggctcactgagactacatcagctattctgattacacccgagggggatgataaaccgggcgcggtcggtaaagttgttccattttttgaagcgaaggttgtggatctggataccgggaaaacgctgggcgttaatcaaagaggcgaactgtgtgtgagaggtcctatgattatgtccggttatgtaaacaatccggaagcgaccaacgccttgattgacaaggatggatggctacattctggagacatagcttactgggacgaagacgaacacttcttcatcgttgaccgcctgaagtctctgattaagtacaaaggctatcaggtggctcccgctgaattggaatccatcttgctccaacaccccaacatcttcgacgcaggtgtcgcaggtcttcccgacgatgacgccggtgaacttcccgccgccgttgttgttttggagcacggaaagacgatgacggaaaaagagatcgtggattacgtcgccagtcaagtaacaaccgcgaaaaagttgcgcggaggagttgtgtttgtggacgaagtaccgaaaggtcttaccggaaaactcgacgcaagaaaaatcagagagatcctcataaaggccaagaagggcggaaagatcgccgtggcttgcaagaactggttcagtagcttaagccactttgtgatccaccttaacagccacggcttccctcccgaggtggaggagcaggccgccggcaccctgcccatgagctgcgcccaggagagcggcatggatagacaccctgctgcttgcgccagcgccaggatcaacgtctaattctagagtcggggcggccggccgcttcgagcagacatgataagatacattgatgagtttggacaaaccacaactagaatgcagtgaaaaaaatgctttatttgtgaaatttgtgatgctattgctttatttgtaaccattataagctgcaataaacaagttaacaacaacaattgcattcattttatgtttcaggttcagggggaggtgtgggaggttttttaaagcaagtaaaacctctacaaatgtggtaaaatcgataaggatctgaacgatggagcggagaatgggcggaactgggcggagttaggggcgggatgggcggagttaggggcgggactatggttgctgactaattgagatgcatgctttgcatacttctgcctgctggggagcctggggactttccacacctggttgctgactaattgagatgcatgctttgcatacttctgcctgctggggagcctggggactttccacaccctaactgacacacattccacagc

SEQ ID NO: 288 - DNA, 36 bp, Artificial Sequence
  Chemically Synthesized
cgaaaacgggactctagcatacttactgacagccag

SEQ ID NO: 289 - DNA, 36 bp, Artificial Sequence
  Chemically Synthesized
tctgagatcatgaagatctgttccaccattgaagaa

SEQ ID NO: 290 - DNA, 36 bp, Artificial Sequence
  Chemically Synthesized
aggagtgcctgattaatgatccctgggttttgctca

SEQ ID NO: 291 - DNA, 36 bp, Artificial Sequence
  Chemically Synthesized
tgaagggtcttatttcttcggagacaatgcagagga

SEQ ID NO: 292 - DNA, 36 bp, Artificial Sequence
  Chemically Synthesized
ccgtcaggccccctcaaagccgagatcgcgcagaga

SEQ ID NO: 293 - DNA, 36 bp, Artificial Sequence
  Chemically Synthesized
ctggctgtcagtaagtatgctagagtcccgttttcg

SEQ ID NO: 294 - DNA, 36 bp, Artificial Sequence
  Chemically Synthesized
gttcttcaatggtggaacagatcttcatgatctcag

SEQ ID NO: 295 - DNA, 36 bp, Artificial Sequence
  Chemically Synthesized
caaaacccagggatcattaatcaggcactcctcgat

SEQ ID NO: 296 - DNA, 36 bp, Artificial Sequence
  Chemically Synthesized
tcctctgcattgtctccgaagaaataagatccttca

SEQ ID NO: 297 - DNA, 36 bp, Artificial Sequence
  Chemically Synthesized
tctctgcgcgatctcggctttgagggggcctgacgg

SEQ ID NO: 298 - protein, 34 aa, Artificial Sequence
  Chemically Synthesized
KKRNSNEYRLVPTKWQDYKKPGPNQKYTSDGKKR

SEQ ID NO: 299 - protein, 36 aa, Artificial Sequence
  Chemically Synthesized
KKRLHLIIADAELETVPPEILDHPAIVNYAKRRKKR

SEQ ID NO: 300 - protein, 29 aa, Artificial Sequence
  Chemically Synthesized
KKRIEELEIELGLRAPPKKEKKGKKSKKR

SEQ ID NO: 301 - protein, 26 aa, Artificial Sequence
  Chemically Synthesized
KKRALKYRLNPKLLKENNKKDVNKKR

SEQ ID NO: 302 - protein, 26 aa, Artificial Sequence
  Chemically Synthesized
KKRNFLESIEISINLKDVDLSDPKKR

SEQ ID NO: 303 - protein, 30 aa, Artificial Sequence
  Chemically Synthesized
KKRSEKSMALRLAGELSEAAEGRGGAMKKR

SEQ ID NO: 304 - protein, 30 aa, Artificial Sequence
  Chemically Synthesized
KKRFKLTGTGKIKRKHAFKSHILTKKSKKR

SEQ ID NO: 305 - protein, 30 aa, Artificial Sequence
  Chemically Synthesized
KKRNEHTMEERLAGELADAVNGRGTAVKKR

SEQ ID NO: 306 - protein, 30 aa, Artificial Sequence; identical to SEQ ID NO: 303
  Chemically Synthesized

SEQ ID NO: 307 - protein, 30 aa, Artificial Sequence
  Chemically Synthesized
KKRGEKSMSLRLANELMEATEGRGGAMKKR

SEQ ID NO: 308 - protein, 46 aa, Artificial Sequence
  Chemically Synthesized
KKRLATHNAGKGAKYTRYRLPVSLLYYEVFDSKEAAMSAEALFKKR

SEQ ID NO: 309 - protein, 30 aa, Artificial Sequence; identical to SEQ ID NO: 303
  Chemically Synthesized

SEQ ID NO: 310 - protein, 30 aa, Artificial Sequence; identical to SEQ ID NO: 303
  Chemically Synthesized

SEQ ID NO: 311 - protein, 30 aa, Artificial Sequence; identical to SEQ ID NO: 303
  Chemically Synthesized

SEQ ID NO: 312 - protein, 30 aa, Artificial Sequence; identical to SEQ ID NO: 303
  Chemically Synthesized

SEQ ID NO: 313 - protein, 30 aa, Artificial Sequence; identical to SEQ ID NO: 303
  Chemically Synthesized

SEQ ID NO: 314 - protein, 30 aa, Artificial Sequence
  Chemically Synthesized
KKRGEKSMAQRLANELLEAAEGRGGAMKKR

SEQ ID NO: 315 - protein, 30 aa, Artificial Sequence
  Chemically Synthesized
KKRFKVTGSGKIKRKHAFKSHILTKKSKKR

SEQ ID NO: 316 - protein, 44 aa, Artificial Sequence
  Chemically Synthesized
KKRKKYLKAAKGYRGALSRRYKLAKQMYVRSKWYSYVGRKLKKR

SEQ ID NO: 317 - protein, 30 aa, Artificial Sequence; identical to SEQ ID NO: 315
  Chemically Synthesized

SEQ ID NO: 318 - protein, 44 aa, Artificial Sequence
  Chemically Synthesized
KKRKKIMKAVKGYRGALSRRYRLAKQAYIKAKKHAYVGRKLKKR

SEQ ID NO: 319 - protein, 32 aa, Artificial Sequence
  Chemically Synthesized
KKRGYQTHGIRPRLAKKKTVMSKIARKQGKKR

SEQ ID NO: 320 - protein, 45 aa, Artificial Sequence
  Chemically Synthesized
KKRREKFLKSAKGYRGAIKRRYRLAKQHYYRAKWYAYAGRKLKKR

SEQ ID NO: 321 - protein, 37 aa, Artificial Sequence
  Chemically Synthesized
KKRIGLIFGGYSNEHEVSISSAKTVFQAFNSEINKKR

SEQ ID NO: 322 - protein, 30 aa, Artificial Sequence; identical to SEQ ID NO: 303
  Chemically Synthesized

SEQ ID NO: 323 - protein, 30 aa, Artificial Sequence
  Chemically Synthesized
KKRGEKSMDLRLAGELIDASEGRGAAMKKR

SEQ ID NO: 324 - protein, 46 aa, Artificial Sequence
  Chemically Synthesized
KKRFSFHALHLRLSPRLLKSEKAQRHTKEYTARLYRAFMRSVEKKR

SEQ ID NO: 325 - protein, 30 aa, Artificial Sequence
  Chemically Synthesized
KKRNEKTMEERLAKEILDASQGTGAAVKKR

SEQ ID NO: 326 - protein, 46 aa, Artificial Sequence
  Chemically Synthesized
KKRAMELGIDVITPKNINDEEVFDLLDKLNPDFIVVVAYGQLIKKR

SEQ ID NO: 327 - protein, 30 aa, Artificial Sequence; identical to SEQ ID NO: 303
  Chemically Synthesized

SEQ ID NO: 328 - protein, 44 aa, Artificial Sequence
  Chemically Synthesized
KKRKKYLKAAKGYRGALSRRYKLAKQMYVRSKWYSYVGRKQKKR

SEQ ID NO: 329 - protein, 42 aa, Artificial Sequence
  Chemically Synthesized
KKRRAILEAASGYRGQRSRLYRKAKEQVTHSLVYNYNDRKKR

SEQ ID NO: 330 - protein, 30 aa, Artificial Sequence; identical to SEQ ID NO: 314
  Chemically Synthesized

SEQ ID NO: 331 - protein, 30 aa, Artificial Sequence; identical to SEQ ID NO: 303
  Chemically Synthesized

SEQ ID NO: 332 - protein, 30 aa, Artificial Sequence; identical to SEQ ID NO: 303
  Chemically Synthesized

SEQ ID NO: 333 - protein, 30 aa, Artificial Sequence; identical to SEQ ID NO: 303
  Chemically Synthesized

SEQ ID NO: 334 - protein, 30 aa, Artificial Sequence
  Chemically Synthesized
KKRSEKSMALRLAGELLEASEGRGGAMKKR

SEQ ID NO: 335 - protein, 29 aa, Artificial Sequence
  Chemically Synthesized
KKRMKSIGTVEVPQEAFLAILKTDTSKKR

SEQ ID NO: 336 - protein, 30 aa, Artificial Sequence
  Chemically Synthesized
KKRSEKSMALRLAGELLEAAEGRGGAMKKR

SEQ ID NO: 337 - protein, 30 aa, Artificial Sequence; identical to SEQ ID NO: 303
  Chemically Synthesized

SEQ ID NO: 338 - protein, 42 aa, Artificial Sequence
  Chemically Synthesized
KKRILNKAKGYWGSRGTILTVAKHAVDKAEQYAYRDRRVKKR

SEQ ID NO: 339 - protein, 44 aa, Artificial Sequence
  Chemically Synthesized
KKRRKILKAVKGYHGALSRRYRLAKQAYIKAKKHAYVGRKLKKR

SEQ ID NO: 340 - protein, 26 aa, Artificial Sequence
  Chemically Synthesized
KKRGIGVKVNNGILWLLELQPEGKKR

SEQ ID NO: 341 - protein, 44 aa, Artificial Sequence
  Chemically Synthesized
KKRKKFLKEAKGYRGALSRRYKLAKQMYIRSKWYSYVGRKIKKR

SEQ ID NO: 342 - protein, 32 aa, Artificial Sequence
  Chemically Synthesized
KKRFSVTGSGKVRRLKAYKSHILTKMSGKKKR

SEQ ID NO: 343 - protein, 43 aa, Artificial Sequence
  Chemically Synthesized
KKRKYLKAAKGYRGALSRRYRLAKQYYIRSGVYAYVGRKQKKR

SEQ ID NO: 344 - protein, 42 aa, Artificial Sequence
  Chemically Synthesized
KKRRAILEQASGYRGQRSRLYRKAKEQVTHSLVYNYNDRKKR

SEQ ID NO: 345 - protein, 46 aa, Artificial Sequence; identical to SEQ ID NO: 308
  Chemically Synthesized

SEQ ID NO: 346 - protein, 46 aa, Artificial Sequence; identical to SEQ ID NO: 308
  Chemically Synthesized

SEQ ID NO: 347 - protein, 27 aa, Artificial Sequence
  Chemically Synthesized
KKRIPNTVFIFLVPPEKKALYDRLKKR

SEQ ID NO: 348 - protein, 46 aa, Artificial Sequence; identical to SEQ ID NO: 308
  Chemically Synthesized

SEQ ID NO: 349 - protein, 40 aa, Artificial Sequence
  Chemically Synthesized
KKRILDTLFTRSPKNQQDFIEHTDDKKSIVNFFVGAFKKR

SEQ ID NO: 350 - protein, 26 aa, Artificial Sequence
  Chemically Synthesized
KKRELQELNQIRRNLEQSNASLLKKR

SEQ ID NO: 351 - protein, 37 aa, Artificial Sequence
  Chemically Synthesized
KKRNHMAWVWGIVGLIQAPMPLICYYFFVIRPDRKKR

SEQ ID NO: 352 - protein, 40 aa, Artificial Sequence
  Chemically Synthesized
KKRLFEEQQEAKKIDYANSRIKAIKLIGAIIFFMKSSKKR

SEQ ID NO: 353 - protein, 28 aa, Artificial Sequence
  Chemically Synthesized
KKRKKIPGLAMIVIGNNPASLIYVNKKR

SEQ ID NO: 354 - protein, 27 aa, Artificial Sequence
  Chemically Synthesized
KKRPELLIAFGGCMAQLPEVRQKLKKR

SEQ ID NO: 355 - protein, 30 aa, Artificial Sequence; identical to SEQ ID NO: 303
  Chemically Synthesized

SEQ ID NO: 356 - protein, 30 aa, Artificial Sequence; identical to SEQ ID NO: 334
  Chemically Synthesized

SEQ ID NO: 357 - protein, 32 aa, Artificial Sequence
  Chemically Synthesized
KKRGYQKYGVRPRLAKKKTVMCKIARKQGKKR

SEQ ID NO: 358 - protein, 31 aa, Artificial Sequence
  Chemically Synthesized
KKRSSHSKKQRGNKSRGFDQKSQRVSKGKKR

SEQ ID NO: 359 - protein, 32 aa, Artificial Sequence; identical to SEQ ID NO: 357
  Chemically Synthesized

SEQ ID NO: 360 - protein, 31 aa, Artificial Sequence
  Chemically Synthesized
KKRSSHSKKQRGNKSRGFDQKSQRSSKGKKR

SEQ ID NO: 361 - protein, 30 aa, Artificial Sequence; identical to SEQ ID NO: 307
  Chemically Synthesized

SEQ ID NO: 362 - protein, 30 aa, Artificial Sequence; identical to SEQ ID NO: 303
  Chemically Synthesized

SEQ ID NO: 363 - protein, 44 aa, Artificial Sequence
  Chemically Synthesized
KKRRKLLKEARGYRGTKHTSYKRAKEQVWKSGVYAYVGRKQKKR

SEQ ID NO: 364 - protein, 30 aa, Artificial Sequence; identical to SEQ ID NO: 303
  Chemically Synthesized

SEQ ID NO: 365 - protein, 46 aa, Artificial Sequence; identical to SEQ ID NO: 308
  Chemically Synthesized

SEQ ID NO: 366 - protein, 46 aa, Artificial Sequence; identical to SEQ ID NO: 308
  Chemically Synthesized

SEQ ID NO: 367 - protein, 46 aa, Artificial Sequence; identical to SEQ ID NO: 308
  Chemically Synthesized

SEQ ID NO: 368 - protein, 46 aa, Artificial Sequence; identical to SEQ ID NO: 308
  Chemically Synthesized

SEQ ID NO: 369 - protein, 30 aa, Artificial Sequence; identical to SEQ ID NO: 336
  Chemically Synthesized

SEQ ID NO: 370 - protein, 30 aa, Artificial Sequence; identical to SEQ ID NO: 323
  Chemically Synthesized

SEQ ID NO: 371 - protein, 27 aa, Artificial Sequence
  Chemically Synthesized
KKRMPNTVFIFLVPPKKKDLYDRLKKR

SEQ ID NO: 372 - protein, 30 aa, Artificial Sequence; identical to SEQ ID NO: 303
  Chemically Synthesized

SEQ ID NO: 373 - protein, 30 aa, Artificial Sequence; identical to SEQ ID NO: 303
  Chemically Synthesized

SEQ ID NO: 374 - protein, 30 aa, Artificial Sequence; identical to SEQ ID NO: 303
  Chemically Synthesized

SEQ ID NO: 375 - protein, 45 aa, Artificial Sequence
  Chemically Synthesized
KKRKGMSNKKVLTGVVVATKCDKTIKVMVSRMVRHKTYKKIVKKR

SEQ ID NO: 376 - protein, 30 aa, Artificial Sequence; identical to SEQ ID NO: 334
  Chemically Synthesized

SEQ ID NO: 377 - protein, 46 aa, Artificial Sequence; identical to SEQ ID NO: 308
  Chemically Synthesized

SEQ ID NO: 378 - protein, 40 aa, Artificial Sequence
  Chemically Synthesized
KKRILDTFFKRNNSNHKDFVEHEEKRKSLLKIAINAFKKR

SEQ ID NO: 379 - protein, 44 aa, Artificial Sequence
  Chemically Synthesized
KKRDNTRLIHYEGTTRRGESYYVDVFSLMYPKMDILLEYASKKR

SEQ ID NO: 380 - protein, 30 aa, Artificial Sequence
  Chemically Synthesized
KKRFALTGTGKIKRKHAFHSHILTKKSKKR

SEQ ID NO: 381 - protein, 41 aa, Artificial Sequence
  Chemically Synthesized
KKRATVRIQGQTYKVVSSEEPAHVKEVASYMNKKMEELKKR

SEQ ID NO: 382 - protein, 46 aa, Artificial Sequence; identical to SEQ ID NO: 308
  Chemically Synthesized

SEQ ID NO: 383 - protein, 30 aa, Artificial Sequence; identical to SEQ ID NO: 303
  Chemically Synthesized

SEQ ID NO: 384 - protein, 30 aa, Artificial Sequence; identical to SEQ ID NO: 303
  Chemically Synthesized

SEQ ID NO: 385 - protein, 30 aa, Artificial Sequence; identical to SEQ ID NO: 380
  Chemically Synthesized

SEQ ID NO: 386 - protein, 30 aa, Artificial Sequence
  Chemically Synthesized
KKREFETQGRKPHWRFLLPNFENDPLQKKR

SEQ ID NO: 387 - protein, 46 aa, Artificial Sequence
  Chemically Synthesized
KKRKIIALCGIDTRALTVLIREKGALNGIIAHDPNGNFDINTLKKR

SEQ ID NO: 388 - protein, 36 aa, Artificial Sequence
  Chemically Synthesized
KKRSRGVGSEGPAVFREKSTTQVDVEARKSQKDKKR

SEQ ID NO: 389 - protein, 42 aa, Artificial Sequence
  Chemically Synthesized
KKRLFKLAKGFVGDRKNHLRLTSGAVMRAMAYNYAHRKQKKR

SEQ ID NO: 390 - protein, 36 aa, Artificial Sequence
  Chemically Synthesized
KKRFERKKEASPADTPPESDSTTENASVEKKAEKKR

SEQ ID NO: 391 - protein, 27 aa, Artificial Sequence
  Chemically Synthesized
KKRLDKEGVMKSVKAHRFYSKPSIKKR

SEQ ID NO: 392 - protein, 45 aa, Artificial Sequence
  Chemically Synthesized
KKRPEQGRIAALYSDIVILADEDPRGEDSVELLEMIAAGCPEKKR

SEQ ID NO: 393 - protein, 36 aa, Artificial Sequence
  Chemically Synthesized
KKRSLPNLRTVRVKLEDGTTVKLRVAASTLRTMKKR

SEQ ID NO: 394 - protein, 30 aa, Artificial Sequence
  Chemically Synthesized
KKRFRLSAKGKAMHRQSGTSHLAKGLSKKR

SEQ ID NO: 395 - protein, 30 aa, Artificial Sequence; identical to SEQ ID NO: 323
  Chemically Synthesized

SEQ ID NO: 396 - protein, 30 aa, Artificial Sequence; identical to SEQ ID NO: 323
  Chemically Synthesized

SEQ ID NO: 397 - protein, 30 aa, Artificial Sequence; identical to SEQ ID NO: 323
  Chemically Synthesized

SEQ ID NO: 398 - protein, 42 aa, Artificial Sequence; identical to SEQ ID NO: 329
  Chemically Synthesized

SEQ ID NO: 399 - protein, 42 aa, Artificial Sequence
  Chemically Synthesized
KKRIQYNERLEFLGDSVLQLVITEYLFMNYKDKSEGELSKKR

SEQ ID NO: 400 - protein, 30 aa, Artificial Sequence
  Chemically Synthesized
KKRFTLTGTGKIKRKHAFHSHILTKKSKKR

SEQ ID NO: 401 - protein, 43 aa, Artificial Sequence
  Chemically Synthesized
KKRDLENCSYQASGISVVSHPKNPYVPTSHLNIRFFLAKNKKR

SEQ ID NO: 402 - protein, 26 aa, Artificial Sequence
  Chemically Synthesized
KKRRDFLKNNHVSFLISIHADSSKKR

SEQ ID NO: 403 - protein, 46 aa, Artificial Sequence; identical to SEQ ID NO: 308
  Chemically Synthesized

SEQ ID NO: 404 - protein, 32 aa, Artificial Sequence; identical to SEQ ID NO: 357
  Chemically Synthesized

SEQ ID NO: 405 - protein, 31 aa, Artificial Sequence
  Chemically Synthesized
KKRSSHSKKQRGNKSRGFDQKSQRGSKGKKR

SEQ ID NO: 406 - protein, 30 aa, Artificial Sequence; identical to SEQ ID NO: 334
  Chemically Synthesized

SEQ ID NO: 407 - protein, 30 aa, Artificial Sequence
  Chemically Synthesized
KKREIFTSIFEDKIDLKLFSFLIILIEKKR

SEQ ID NO: 408 - protein, 31 aa, Artificial Sequence
  Chemically Synthesized
KKRARRPGVPTRGDKKRAPRLGVPARGDKKR

SEQ ID NO: 409 - protein, 31 aa, Artificial Sequence
  Chemically Synthesized
KKRAPRLGVPARGDKKRARRPGVPAREDKKR

SEQ ID NO: 410 - protein, 31 aa, Artificial Sequence
  Chemically Synthesized
KKRARRPGVPAREDKKRAPRPGVPTRGDKKR

SEQ ID NO: 411 - protein, 31 aa, Artificial Sequence
  Chemically Synthesized
KKRAPRPGVPTRGDKKRAPRLGVPARGDKKR

SEQ ID NO: 412 - protein, 45 aa, Artificial Sequence
  Chemically Synthesized
KKRARRPGVPTRGDKKRAPRLGVPARGDKKRARRPGVPAREDKKR

SEQ ID NO: 413 - protein, 45 aa, Artificial Sequence
  Chemically Synthesized
KKRAPRLGVPARGDKKRARRPGVPAREDKKRAPRPGVPTRGDKKR

SEQ ID NO: 414 - protein, 45 aa, Artificial Sequence
  Chemically Synthesized
KKRARRPGVPAREDKKRAPRPGVPTRGDKKRAPRLGVPARGDKKR

SEQ ID NO: 415 - protein, 44 aa, Artificial Sequence; identical to SEQ ID NO: 328
  Chemically Synthesized

SEQ ID NO: 416 - protein, 45 aa, Artificial Sequence
  Chemically Synthesized
KKRTSVPDDDFVFTLSDDENDVLENGADEGDEQADEETASGSKKR

SEQ ID NO: 417 - protein, 38 aa, Artificial Sequence
  Chemically Synthesized
KKRAAAKDDDFVLTLSDDENDVLENGVEEDTLSSSKKR

SEQ ID NO: 418 - protein, 42 aa, Artificial Sequence
  Chemically Synthesized
KKRLQKQAKEEERARREAEKAAEEAAAKAEQEKKLEEQRKKR

SEQ ID NO: 419 - protein, 45 aa, Artificial Sequence
  Chemically Synthesized
KKRANADDDFVLTLSDDENDTLNQLEEEGEGDDGALATGSKTKKR

SEQ ID NO: 420 - protein, 44 aa, Artificial Sequence
  Chemically Synthesized
KKRAQETKIDSKESVKESPKQENSILKRLASSIKKQELPFTKKR

SEQ ID NO: 421 - protein, 46 aa, Artificial Sequence
  Chemically Synthesized
KKRSAEEEEKDLKKIMMTNKQRKLYNKMQYGINKKETRQDELAKKR

SEQ ID NO: 422 - protein, 35 aa, Artificial Sequence
  Chemically Synthesized
KKRKAHEERKEEKRSYKKTKSDRSAPKTKAKSKKR

SEQ ID NO: 423 - protein, 41 aa, Artificial Sequence
  Chemically Synthesized
KKRTIDKVDDSVEDGAEKKPEAAVKNDGETAEKPEKKHKKR

SEQ ID NO: 424 - protein, 39 aa, Artificial Sequence
  Chemically Synthesized
KKRKANEERKEEGKERSYKKTKADRTKLKTKAKSSSKKR

SEQ ID NO: 425 - protein, 26 aa, Artificial Sequence
  Chemically Synthesized
KKRAAQKKKEEEELERQKMMMSRKKR

SEQ ID NO: 426 - protein, 38 aa, Artificial Sequence
  Chemically Synthesized
KKRKREIERLEKMTDEEKKEEQAKEKELQDLIEQVKKR

SEQ ID NO: 427 - protein, 26 aa, Artificial Sequence
  Chemically Synthesized
KKRGHNSIIGHEKTNALETLKKKKKR

SEQ ID NO: 428 - protein, 43 aa, Artificial Sequence
  Chemically Synthesized
KKRSAKIKKATFDANKKKEVGVSDLTLLSKISDESINENLKKR

SEQ ID NO: 429 - protein, 37 aa, Artificial Sequence
  Chemically Synthesized
KKRKAREILDKHRKEEKELVKEGKTPYYLKKAEQKKR

SEQ ID NO: 430 - protein, 39 aa, Artificial Sequence
  Chemically Synthesized
KKRTHDELEQDGKEEEEKKEGEKPSSQNRAERDEPEKKR

SEQ ID NO: 431 - protein, 35 aa, Artificial Sequence
  Chemically Synthesized
KKRSLEDNETEIKVSRDTWNTKNMRSLEPPRSKKR

SEQ ID NO: 432 - protein, 35 aa, Artificial Sequence; identical to SEQ ID NO: 431
  Chemically Synthesized

SEQ ID NO: 433 - protein, 45 aa, Artificial Sequence
  Chemically Synthesized
KKRLPQAKRACAKCQKDNKKCDDARPCQRCIKAKTDCIDLPRKKR

SEQ ID NO: 434 - protein, 26 aa, Artificial Sequence
  Chemically Synthesized
KKRNSEEANDENDETNLKIPIPEKKR

SEQ ID NO: 435 - protein, 37 aa, Artificial Sequence
  Chemically Synthesized
KKRKVNELSQDVISLHSPKESNARKTKKNKNKKKKKR

SEQ ID NO: 436 - protein, 34 aa, Artificial Sequence
  Chemically Synthesized
KKRKSKSKQESSDSGVSEDDEIPLSDARNKTKKR

SEQ ID NO: 437 - protein, 45 aa, Artificial Sequence
  Chemically Synthesized
KKRKLKDTVSNCEFTEEDSESSFLLETIQPTKSTLRRSISPLKKR

SEQ ID NO: 438 - protein, 35 aa, Artificial Sequence
  Chemically Synthesized
KKRAEKKEQQKEKKKEKEKERMKAFIPPEESSKKR

SEQ ID NO: 439 - protein, 35 aa, Artificial Sequence
  Chemically Synthesized
KKRSANELAIDDQDTKESTDLAGTEDSAPKANKKR

SEQ ID NO: 440 - protein, 44 aa, Artificial Sequence
  Chemically Synthesized
KKRLTYSELFHKTQELNEELQSCLQKILEASADRNESKQDAKKR

SEQ ID NO: 441 - protein, 31 aa, Artificial Sequence
  Chemically Synthesized
KKRTKIQCSHFDLLVKLGQGGYGSVWLAKKR

SEQ ID NO: 442 - protein, 35 aa, Artificial Sequence
  Chemically Synthesized
KKRKSKLVEMTPKGLKKRKRVQIQEGSVSTNTKKR

SEQ ID NO: 443 - protein, 42 aa, Artificial Sequence
  Chemically Synthesized
KKRNVEEQNLIEQSITESQRIFSEKQRLEQERFNRELLEKKR

SEQ ID NO: 444 - protein, 35 aa, Artificial Sequence; identical to SEQ ID NO: 431
  Chemically Synthesized

SEQ ID NO: 445 - protein, 35 aa, Artificial Sequence; identical to SEQ ID NO: 431
  Chemically Synthesized

SEQ ID NO: 446 - protein, 35 aa, Artificial Sequence; identical to SEQ ID NO: 431
  Chemically Synthesized

SEQ ID NO: 447 - protein, 35 aa, Artificial Sequence; identical to SEQ ID NO: 431
  Chemically Synthesized

SEQ ID NO: 448 - protein, 35 aa, Artificial Sequence; identical to SEQ ID NO: 431
  Chemically Synthesized

SEQ ID NO: 449 - protein, 35 aa, Artificial Sequence; identical to SEQ ID NO: 431
  Chemically Synthesized

SEQ ID NO: 450 - protein, 35 aa, Artificial Sequence; identical to SEQ ID NO: 431
  Chemically Synthesized

SEQ ID NO: 451 - protein, 35 aa, Artificial Sequence; identical to SEQ ID NO: 431
  Chemically Synthesized

SEQ ID NO: 452 - protein, 35 aa, Artificial Sequence
  Chemically Synthesized
KKRSLEDNETEIEVSRDTWNNKNMRSLEPPRSKKR

SEQ ID NO: 453 - protein, 35 aa, Artificial Sequence; identical to SEQ ID NO: 452
  Chemically Synthesized

SEQ ID NO: 454 - protein, 40 aa, Artificial Sequence
  Chemically Synthesized
KKRVEKLDWMYAAPSTEGGALGGARIGERDMEEYLLGKKR

SEQ ID NO: 455 - protein, 40 aa, Artificial Sequence; identical to SEQ ID NO: 454
  Chemically Synthesized

SEQ ID NO: 456 - protein, 35 aa, Artificial Sequence; identical to SEQ ID NO: 452
  Chemically Synthesized

SEQ ID NO: 457 - protein, 35 aa, Artificial Sequence; identical to SEQ ID NO: 452
  Chemically Synthesized

SEQ ID NO: 458 - protein, 29 aa, Artificial Sequence
  Chemically Synthesized
KKRKRRSKKINKLTDGQIRINHVSSEKKR

SEQ ID NO: 459 - protein, 37 aa, Artificial Sequence
  Chemically Synthesized
KKRSKLTSKHAETADSQSSAASSDHESGQSQAHTKKR

SEQ ID NO: 460 - protein, 39 aa, Artificial Sequence
  Chemically Synthesized
KKRDAETADIGDQSEVESDTEELKKIMFGEKKKLNKKKR

SEQ ID NO: 461 - protein, 29 aa, Artificial Sequence
  Chemically Synthesized
KKRAGGTKRKKATAEPSDNDILSQMTKKR

SEQ ID NO: 462 - protein, 35 aa, Artificial Sequence; identical to SEQ ID NO: 452
  Chemically Synthesized

SEQ ID NO: 463 - protein, 33 aa, Artificial Sequence
  Chemically Synthesized
KKRVYYDDGLTEEQFLEAVEDDNMSLEDAIKKR

SEQ ID NO: 464 - protein, 43 aa, Artificial Sequence
  Chemically Synthesized
KKRSAKIKKATFDANKKKEVGISDLTLLSKISDESINENLKKR

SEQ ID NO: 465 - protein, 37 aa, Artificial Sequence
  Chemically Synthesized
KKRKRLESEQEQDQDEIASDSDMEDIDSDLENNSKKR

SEQ ID NO: 466 - protein, 26 aa, Artificial Sequence
  Chemically Synthesized
KKRGHNSIIGHEKTNALETLKKKKKR

SEQ ID NO: 467 - protein, 35 aa, Artificial Sequence; identical to SEQ ID NO: 431
  Chemically Synthesized

SEQ ID NO: 468 - protein, 35 aa, Artificial Sequence; identical to SEQ ID NO: 431
  Chemically Synthesized

SEQ ID NO: 469 - protein, 35 aa, Artificial Sequence
  Chemically Synthesized
KKRAHSSGERRSSVSKPARDPSDKPEESPSKKKKR

SEQ ID NO: 470 - protein, 42 aa, Artificial Sequence
  Chemically Synthesized
KKRLKSSLRFRKLEILLELPFFIPFEERVDLFYMFIALDKKR

SEQ ID NO: 471 - protein, 35 aa, Artificial Sequence
  Chemically Synthesized
KKRMQAVFTNVHKFKPDASRDESKETYYIGLKKKR

SEQ ID NO: 472 - protein, 35 aa, Artificial Sequence
  Chemically Synthesized
KKRKPTEVNDSENNSSEEDKKKGQNVTSETHSKKR

SEQ ID NO: 473 - protein, 42 aa, Artificial Sequence
  Chemically Synthesized
KKREAEAQWCRIHGQSCWKRDALPEAEPQWCRIHGQSCWKKR

SEQ ID NO: 474 - protein, 35 aa, Artificial Sequence; identical to SEQ ID NO: 431
  Chemically Synthesized

SEQ ID NO: 475 - protein, 35 aa, Artificial Sequence; identical to SEQ ID NO: 452
  Chemically Synthesized

SEQ ID NO: 476 - protein, 35 aa, Artificial Sequence; identical to SEQ ID NO: 431
  Chemically Synthesized

SEQ ID NO: 477 - protein, 35 aa, Artificial Sequence; identical to SEQ ID NO: 431
  Chemically Synthesized

SEQ ID NO: 478 - protein, 45 aa, Artificial Sequence
  Chemically Synthesized
KKRKDPDSDDWSESNSKENKIDNKHLNLLSSDSEIEQDYQKAKKR

SEQ ID NO: 479 - protein, 35 aa, Artificial Sequence; identical to SEQ ID NO: 431
  Chemically Synthesized

SEQ ID NO: 480 - protein, 35 aa, Artificial Sequence; identical to SEQ ID NO: 431
  Chemically Synthesized

SEQ ID NO: 481 - protein, 35 aa, Artificial Sequence
  Chemically Synthesized
KKRVIDDEDDKEVDTTLPGWGEWAGAGSKPKNKKR

SEQ ID NO: 482 - protein, 35 aa, Artificial Sequence; identical to SEQ ID NO: 431
  Chemically Synthesized

SEQ ID NO: 483 - protein, 35 aa, Artificial Sequence; identical to SEQ ID NO: 431
  Chemically Synthesized

SEQ ID NO: 484 - protein, 26 aa, Artificial Sequence
  Chemically Synthesized
KKRRRGNGKHLSRKEKRKMERADKKR

SEQ ID NO: 485 - protein, 35 aa, Artificial Sequence; identical to SEQ ID NO: 431
  Chemically Synthesized

SEQ ID NO: 486 - protein, 40 aa, Artificial Sequence
  Chemically Synthesized
KKRNGSMHNMYYASVPFLLFSNAYSIDFSRHVNEFLEKKR

SEQ ID NO: 487 - protein, 35 aa, Artificial Sequence; identical to SEQ ID NO: 452
  Chemically Synthesized

SEQ ID NO: 488 - protein, 35 aa, Artificial Sequence; identical to SEQ ID NO: 431
  Chemically Synthesized

SEQ ID NO: 489 - protein, 28 aa, Artificial Sequence
  Chemically Synthesized
KKRYMTTKQTRTVQNQTMPRSNTTTKKR

SEQ ID NO: 490 - protein, 37 aa, Artificial Sequence
  Chemically Synthesized
KKREFEAAPAKTYADFLRAYQSWNTFVNPDRPNLKKR

SEQ ID NO: 491 - protein, 37 aa, Artificial Sequence
  Chemically Synthesized
KKREFEAAPEKSYADFLRAYHSWNTFVNPDRPNLKKR

SEQ ID NO: 492 - protein, 37 aa, Artificial Sequence; identical to SEQ ID NO: 490
  Chemically Synthesized

SEQ ID NO: 493 - protein, 46 aa, Artificial Sequence
  Chemically Synthesized
KKRDKKKQLKLAKEEERQRREAERLAEQAAQKALEAKRQEEARKKR

SEQ ID NO: 494 - protein, 26 aa, Artificial Sequence
  Chemically Synthesized
KKREALLNIEEGRDVKGNRMVGMKKR

SEQ ID NO: 495 - protein, 35 aa, Artificial Sequence; identical to SEQ ID NO: 431
  Chemically Synthesized

SEQ ID NO: 496 - protein, 35 aa, Artificial Sequence; identical to SEQ ID NO: 431
  Chemically Synthesized

SEQ ID NO: 497 - protein, 35 aa, Artificial Sequence; identical to SEQ ID NO: 452
  Chemically Synthesized

SEQ ID NO: 498 - protein, 35 aa, Artificial Sequence; identical to SEQ ID NO: 431
  Chemically Synthesized

SEQ ID NO: 499 - protein, 35 aa, Artificial Sequence; identical to SEQ ID NO: 431
  Chemically Synthesized

SEQ ID NO: 500 - protein, 35 aa, Artificial Sequence; identical to SEQ ID NO: 431
  Chemically Synthesized

SEQ ID NO: 501 - protein, 35 aa, Artificial Sequence; identical to SEQ ID NO: 431
  Chemically Synthesized

SEQ ID NO: 502 - protein, 35 aa, Artificial Sequence; identical to SEQ ID NO: 431
  Chemically Synthesized

SEQ ID NO: 503 - protein, 35 aa, Artificial Sequence; identical to SEQ ID NO: 452
  Chemically Synthesized

SEQ ID NO: 504 - protein, 41 aa, Artificial Sequence
  Chemically Synthesized
KKRKLGPKAPNPLSVKKKKKVNSPSDEVKDKEDTSKEKKKR

SEQ ID NO: 505 - protein, 35 aa, Artificial Sequence; identical to SEQ ID NO: 431
  Chemically Synthesized

SEQ ID NO: 506 - protein, 35 aa, Artificial Sequence; identical to SEQ ID NO: 452
  Chemically Synthesized

SEQ ID NO: 507 - protein, 35 aa, Artificial Sequence; identical to SEQ ID NO: 431
  Chemically Synthesized

SEQ ID NO: 508 - protein, 35 aa, Artificial Sequence; identical to SEQ ID NO: 452
  Chemically Synthesized

SEQ ID NO: 509 - protein, 35 aa, Artificial Sequence; identical to SEQ ID NO: 452
  Chemically Synthesized

SEQ ID NO: 510 - protein, 31 aa, Artificial Sequence
  Chemically Synthesized
KKRKGGNGSSDEEEDSDDDMAGKDKGKRKKR

SEQ ID NO: 511 - protein, 45 aa, Artificial Sequence
  Chemically Synthesized
KKRKRKHGGSGNAALTSANAAKSLVKTTLSSKGEASAEKQEMKKR

SEQ ID NO: 512 - protein, 26 aa, Artificial Sequence
  Chemically Synthesized
KKRKADRRSDKEDDKLGKKEKKSKKR

SEQ ID NO: 513 - protein, 44 aa, Artificial Sequence
  Chemically Synthesized
KKRDKKEKKERRDKKEKKEKRRIEKAAAESGAETGDSISEEKKR

SEQ ID NO: 514 - protein, 46 aa, Artificial Sequence
  Chemically Synthesized
KKRTAPKDDDFVLTLSDDENDVFSGINEDGDDHLDEETAKSTTKKR

SEQ ID NO: 515 - protein, 42 aa, Artificial Sequence
  Chemically Synthesized
KKRVDEAREKRVGRFRDGMGSKKELKGREDIRKARIEKEKKR

SEQ ID NO: 516 - protein, 34 aa, Artificial Sequence
  Chemically Synthesized
KKRIDRVDWMYATPATTGSGSAAEMEDYLLGKKR

SEQ ID NO: 517 - protein, 34 aa, Artificial Sequence
  Chemically Synthesized
KKRKTSDRETQNVTTKKQKIETIERKKSSLKKKR

SEQ ID NO: 518 - protein, 45 aa, Artificial Sequence
  Chemically Synthesized
KKRAAARDDDFVLTLSDDENDIFENGVEEDGDNAQEDTLSSSKKR

SEQ ID NO: 519 - protein, 42 aa, Artificial Sequence; identical to SEQ ID NO: 418
  Chemically Synthesized

SEQ ID NO: 520 - protein, 41 aa, Artificial Sequence
  Chemically Synthesized
KKRLQQLAKEEERKRKEEELKAKEEEQRLQKEKLKAEQKKR

SEQ ID NO: 521 - protein, 37 aa, Artificial Sequence
  Chemically Synthesized
KKRSEIERYSKMFWQNYQKIEGYEKYLSQIEAVEKKR

SEQ ID NO: 522 - protein, 27 aa, Artificial Sequence
  Chemically Synthesized
KKRVAPLLVSTSAAPKNVLQKPLEKKR

SEQ ID NO: 523 - protein, 26 aa, Artificial Sequence
  Chemically Synthesized
KKRAAKKRQEEEELERQKMMMSRKKR

SEQ ID NO: 524 - protein, 46 aa, Artificial Sequence
  Chemically Synthesized
KKRSAEDEEKDLKKIMMSNKQRKLYKKMQYGIDKKEARQDDLTKKR

SEQ ID NO: 525 - protein, 44 aa, Artificial Sequence
  Chemically Synthesized
KKRGSEAVEESDSDSEESESESDDDKKSRKSSKKEKKDKKSKKR

SEQ ID NO: 526 - protein, 41 aa, Artificial Sequence
  Chemically Synthesized
KKRAEKSRTPLTSSTAVISDRPVASVSADTTLVGSVASKKR

SEQ ID NO: 527 - protein, 34 aa, Artificial Sequence
  Chemically Synthesized
KKRFSGSSVTVAMTTAAAAAARLTAFKVTKPKKR

SEQ ID NO: 528 - protein, 28 aa, Artificial Sequence
  Chemically Synthesized
KKREVGVSDLTLLSKVSEEAINENLKKR

SEQ ID NO: 529 - protein, 33 aa, Artificial Sequence
  Chemically Synthesized
KKRLKRTKVPSKIWVDNLNMEYIYAKGESIKKR

SEQ ID NO: 530 - protein, 39 aa, Artificial Sequence
  Chemically Synthesized
KKRYKSELDRAEAIERQLIREEEHLKSLQEKGETQAKKR

SEQ ID NO: 531 - protein, 41 aa, Artificial Sequence
  Chemically Synthesized
KKRKLEVKSDQQTPPATQSEINHTSSVRLEENIQGIKRKKR

SEQ ID NO: 532 - protein, 39 aa, Artificial Sequence
  Chemically Synthesized
KKRGQAAKEAVEVDLVDVGDYVKKATERFQHTVELHKKR

SEQ ID NO: 533 - protein, 33 aa, Artificial Sequence
  Chemically Synthesized
KKRQRKRRREAGSGDEEDEGVSDEVLAARAKKR

SEQ ID NO: 534 - protein, 42 aa, Artificial Sequence
  Chemically Synthesized
KKRVAEAKEKRIGKYKDGEGSKRELKTATDIRKARAVAEKKR

SEQ ID NO: 535 - protein, 34 aa, Artificial Sequence
  Chemically Synthesized
KKRDPPPRPKYEVFTDAQLSREIASYGFKPIKKR

SEQ ID NO: 536 - protein, 39 aa, Artificial Sequence
  Chemically Synthesized
KKRGISALMAKAKEASDVATNGYFKHWDGGVSEDDEKKR

SEQ ID NO: 537 - protein, 28 aa, Artificial Sequence
  Chemically Synthesized
KKRQSKRLTTRKREGMLKRARANERKKR

SEQ ID NO: 538 - protein, 27 aa, Artificial Sequence
  Chemically Synthesized
KKRKKKTVKELNRIRRASRISKKEKKR

SEQ ID NO: 539 - protein, 38 aa, Artificial Sequence
  Chemically Synthesized
KKRKKKTVKELNRIRRASRISKKEKKRIFKRYIGMKKR

SEQ ID NO: 540 - protein, 35 aa, Artificial Sequence; identical to SEQ ID NO: 431
  Chemically Synthesized

SEQ ID NO: 541 - protein, 41 aa, Artificial Sequence
  Chemically Synthesized
KKRTGSQYSYYNGGHNVESTNENKLVDASDLLANVDILKKR

SEQ ID NO: 542 - protein, 35 aa, Artificial Sequence; identical to SEQ ID NO: 431
  Chemically Synthesized

SEQ ID NO: 543 - protein, 35 aa, Artificial Sequence; identical to SEQ ID NO: 431
  Chemically Synthesized

SEQ ID NO: 544 - protein, 40 aa, Artificial Sequence
  Chemically Synthesized
KKRVWSREKRLLSEMAITNHSPLLNVDDYRKFREDLWKKR

SEQ ID NO: 545 - protein, 33 aa, Artificial Sequence
  Chemically Synthesized
KKRKRRAKAAEREAQEAEELSMELGLDENLKKR

SEQ ID NO: 546 - protein, 35 aa, Artificial Sequence
  Chemically Synthesized
KKRRRSSSYSPSPVKKKKKKSSKKHKRRRSFSKKR

SEQ ID NO: 547 - protein, 40 aa, Artificial Sequence
  Chemically Synthesized
KKRKKPKGKETFEPEDKTVKQEQINTEPLEDTVLSPTKKR

SEQ ID NO: 548 - protein, 42 aa, Artificial Sequence
  Chemically Synthesized
KKRKKQSQESRMPETVPQEEMPGPPLNSESGEEAPTGRDKKR

SEQ ID NO: 549 - protein, 43 aa, Artificial Sequence
  Chemically Synthesized
KKRKRQKGTEGMEPEEGVTVESQPQVKVEPLEEAIPLPPTKKR

SEQ ID NO: 550 - protein, 26 aa, Artificial Sequence
  Chemically Synthesized
KKRKLDPEIVPEEKDCGDAEGNSKKR

SEQ ID NO: 551 - protein, 46 aa, Artificial Sequence
  Chemically Synthesized
KKRSSIWQFFSRLFSSSSNTTKKPEPPVNLKYNAPTSHVTPSVKKR

SEQ ID NO: 552 - protein, 36 aa, Artificial Sequence
  Chemically Synthesized
KKRRAPPPPGSGPPVQDKASEKVSLGSQIDLQKKKR

SEQ ID NO: 553 - protein, 37 aa, Artificial Sequence
  Chemically Synthesized
KKRQRSESRSASEHSSSAESERSYKKSKKHKKKSKKR

SEQ ID NO: 554 - protein, 32 aa, Artificial Sequence
  Chemically Synthesized
KKRKALEFVTNPDIAAKKKMKKHKNKSEAKKR

SEQ ID NO: 555 - protein, 45 aa, Artificial Sequence
  Chemically Synthesized
KKRFRQLSILVHPDKNQDDADRAQKAFEAVDKAYKLLLDQEQKKR

SEQ ID NO: 556 - protein, 45 aa, Artificial Sequence
  Chemically Synthesized
KKRQQARKTASVLSKDDVAPESGDTTVKKPESKKEQTPEHGKKKR

SEQ ID NO: 557 - protein, 42 aa, Artificial Sequence
  Chemically Synthesized
KKRARLEEENEELRQRLIETELAKQVLQTELERPREHSLKKR

SEQ ID NO: 558 - protein, 35 aa, Artificial Sequence
  Chemically Synthesized
KKRRHRSKVNGLQRGRKKDRPRKHLTLNNKVQKKR

SEQ ID NO: 559 - protein, 30 aa, Artificial Sequence
  Chemically Synthesized
KKRRKEKKVKHKKKGKKQKHCRRHKQTKKR

SEQ ID NO: 560 - protein, 26 aa, Artificial Sequence
  Chemically Synthesized
KKRPRNSYKCGTNTMEREESEQTKKR

SEQ ID NO: 561 - protein, 35 aa, Artificial Sequence
  Chemically Synthesized
KKRQTQSESSNYDSELEKEIKSMSKIGAARTTKKR

SEQ ID NO: 562 - protein, 41 aa, Artificial Sequence
  Chemically Synthesized
KKRGRKPGSVVAAAAAEAKKKAVKESSIRSVQETVLPIKKR

SEQ ID NO: 563 - protein, 27 aa, Artificial Sequence
  Chemically Synthesized
KKRGDGFVNESRLQKIVSVIDEEIKKR

SEQ ID NO: 564 - protein, 27 aa, Artificial Sequence
  Chemically Synthesized
KKRKERFGIVTSSAGTGTTEDTEAKKR

SEQ ID NO: 565 - protein, 40 aa, Artificial Sequence
  Chemically Synthesized
KKRKREESVEQKRSKQNATKLSALLFKHKEQLRAEILKKR

SEQ ID NO: 566 - protein, 33 aa, Artificial Sequence
  Chemically Synthesized
KKRKEEERKKKETDQKKEAVAPVQEESDLEKKR

SEQ ID NO: 567 - protein, 43 aa, Artificial Sequence
  Chemically Synthesized
KKRHKSSSSSSSSSSDSDSSSDSQSSSDSSDSESATEEKSKKR

SEQ ID NO: 568 - protein, 34 aa, Artificial Sequence
  Chemically Synthesized
KKRKKDFQHLISSPLKKSRICDETANATSTLKKR

SEQ ID NO: 569 - protein, 37 aa, Artificial Sequence
  Chemically Synthesized
KKRKKDFQHLISSPLKKSRICDETANATSTLKKRKKR

SEQ ID NO: 570 - protein, 45 aa, Artificial Sequence
  Chemically Synthesized
KKRDQTASAPATPLVNKHRPTFTRSNTISKPYISNTLPSDAPKKR

SEQ ID NO: 571 - protein, 36 aa, Artificial Sequence
  Chemically Synthesized
KKRKNKSSKRKHRKYSDSDSNSESDTNSDSDDDKKR

SEQ ID NO: 572 - protein, 39 aa, Artificial Sequence
  Chemically Synthesized
KKRRQKEEEEATASERNDADEKHPEHAEQNIRKSKKKKR

SEQ ID NO: 573 - protein, 46 aa, Artificial Sequence
  Chemically Synthesized
KKRQQQEEEDLNLEDRGEETVLGGGTREAESRACSDGRSRKSKKKR

SEQ ID NO: 574 - protein, 38 aa, Artificial Sequence
  Chemically Synthesized
KKRIELKHDKKARAMAKRTKDNFHGYNGIPIEEKSKKR

SEQ ID NO: 575 - protein, 41 aa, Artificial Sequence
  Chemically Synthesized
KKRIERFYNCLQHALERETMTNLHPKIKEKNNSSYIHKKKR

SEQ ID NO: 576 - protein, 26 aa, Artificial Sequence
  Chemically Synthesized
KKRRKGSGSEQEGEDEEGGERKKKKR

SEQ ID NO: 577 - protein, 27 aa, Artificial Sequence
  Chemically Synthesized
KKRRRHPKGEEGSDDDETENGPKPKKR

SEQ ID NO: 578 - protein, 37 aa, Artificial Sequence
  Chemically Synthesized
KKRGGGGGRRSKKGGEFDEFVNDDTDDDLPISKKKKR

SEQ ID NO: 579 - protein, 36 aa, Artificial Sequence
  Chemically Synthesized
KKRTALHLACANGNSEVVSLLLDRQCQLHVFDSKKR

SEQ ID NO: 580 - protein, 39 aa, Artificial Sequence
  Chemically Synthesized
KKRKRKEEGEKEKKPRKKVPKQLGVVALNSHKSEKKKKR

SEQ ID NO: 581 - protein, 46 aa, Artificial Sequence
  Chemically Synthesized
KKRLDGIEEVEREITRGRSRKGSELTCPEDNKIKELTLEIERLKKR

SEQ ID NO: 582 - protein, 33 aa, Artificial Sequence
  Chemically Synthesized
KKRKKSYPDDKPLSSESSSESDYEEDVQAKKKR

SEQ ID NO: 583 - protein, 43 aa, Artificial Sequence
  Chemically Synthesized
KKRKALEAKKEEEEIQREMVKLRREIIERRRTVKAAWKIEKKR

SEQ ID NO: 584 - protein, 37 aa, Artificial Sequence
  Chemically Synthesized
KKRKRCGVCEPCQQKTNCGECTYCKNRKNSHQICKKR

SEQ ID NO: 585 - protein, 39 aa, Artificial Sequence
  Chemically Synthesized
KKRMEAEQEMVRMVRAATLIQALWKGYLVRSLLRSKKKR

SEQ ID NO: 586 - protein, 31 aa, Artificial Sequence
  Chemically Synthesized
KKRGRTPKTLISHPISAPSKTAEPLKFPKKR

SEQ ID NO: 587 - protein, 27 aa, Artificial Sequence
  Chemically Synthesized
KKRVGDGSVLRTIHGKEMSKIARKKKR

SEQ ID NO: 588 - protein, 35 aa, Artificial Sequence
  Chemically Synthesized
KKRKDEGKSRTTLPERPLTEVKAETRAEEAPEKKR

SEQ ID NO: 589 - protein, 32 aa, Artificial Sequence
  Chemically Synthesized
KKRKSEDGTPAEDGTPAATGGSQPPSMGRKKR

SEQ ID NO: 590 - protein, 35 aa, Artificial Sequence
  Chemically Synthesized
KKRKKRKSEDGTPAEDGTPAATGGSQPPSMGRKKR

SEQ ID NO: 591 - protein, 33 aa, Artificial Sequence
  Chemically Synthesized
KKRKKISGPNPLSCLKKKKKAPDTQSSASEKKR

SEQ ID NO: 592 - protein, 32 aa, Artificial Sequence
  Chemically Synthesized
KKRSREDAGDNDDTEGAIGVRNKVAGGKMKKR

SEQ ID NO: 593 - protein, 42 aa, Artificial Sequence
  Chemically Synthesized
KKRKGSSSQAPASKKLNKEELPVIPKGKPKSGRVWKDRSKKR

SEQ ID NO: 594 - protein, 44 aa, Artificial Sequence
  Chemically Synthesized
KKRSKLKHRDLEVSCEPDGFEMNFQCAPPLPSDTDQPQETVKKR

SEQ ID NO: 595 - protein, 45 aa, Artificial Sequence
  Chemically Synthesized
KKRRKKSAGERLKEEKPKKSKTSGASKTKGKSKLNTITPVVGKKR

SEQ ID NO: 596 - protein, 29 aa, Artificial Sequence
  Chemically Synthesized
KKRKKGEKQIPGEEKGRKRRRVKEDKKKR

SEQ ID NO: 597 - protein, 32 aa, Artificial Sequence
  Chemically Synthesized
KKREAEEKEKRVRIAKELAERERLERQQKKKR

SEQ ID NO: 598 - protein, 31 aa, Artificial Sequence
  Chemically Synthesized
KKRAATTVLQELKKLPPLPVVEKPKLFFKKR

SEQ ID NO: 599 - protein, 34 aa, Artificial Sequence
  Chemically Synthesized
KKRGLTGDSKKATKESGLISTKKRKMVEMLEKKR

SEQ ID NO: 600 - protein, 27 aa, Artificial Sequence
  Chemically Synthesized
KKRKREKKELKLENHQENSRNQKPKKR

SEQ ID NO: 601 - protein, 44 aa, Artificial Sequence
  Chemically Synthesized
KKRSYKDFLREEEEIAAQVRNSSKKKLKDSELYFLGTDTHKKKR

SEQ ID NO: 602 - protein, 34 aa, Artificial Sequence
  Chemically Synthesized
KKRQLLDSDEEQEEDEGRNRAPELGAPGIQKKKR

SEQ ID NO: 603 - protein, 38 aa, Artificial Sequence
  Chemically Synthesized
KKRGKKKHIKEEPLSEEEPCTSTAIASPEKKKKKKKKR

SEQ ID NO: 604 - protein, 39 aa, Artificial Sequence
  Chemically Synthesized
KKRGRPKKQPLLTVETIHEGTSTSPVSPISREFPGTKKR

SEQ ID NO: 605 - protein, 40 aa, Artificial Sequence
  Chemically Synthesized
KKRKGKVKKTKKKKTSNKKEKTKKSKSKNKKDAKKKAKKR

SEQ ID NO: 606 - protein, 41 aa, Artificial Sequence
  Chemically Synthesized
KKRKFTKEDAIYGVFNDGWGDYEDEEESKMTEEEYYKMKKR

SEQ ID NO: 607 - protein, 32 aa, Artificial Sequence
  Chemically Synthesized
KKRKRATTTEEPQGSRNELVALENIEGIYKKR

SEQ ID NO: 608 - protein, 38 aa, Artificial Sequence
  Chemically Synthesized
KKRGPKKKKYKPEAAEVEKKNEEGDTVKENPIAEAKKR

SEQ ID NO: 609 - protein, 40 aa, Artificial Sequence
  Chemically Synthesized
KKRINEVSTTEGAPAEKKKKVEKWLNTSSEDGEGTKKKKR

SEQ ID NO: 610 - protein, 32 aa, Artificial Sequence
  Chemically Synthesized
KKRNFDEIDRSSMPFPYATKRFYHLSSFDKKR

SEQ ID NO: 611 - protein, 46 aa, Artificial Sequence
  Chemically Synthesized
KKRKNIKLFLNIINSNEYINVNKIFHGKCIYELPFYVNKERIKKKR

SEQ ID NO: 612 - protein, 26 aa, Artificial Sequence
  Chemically Synthesized
KKRKAMVEELIKRGYAPDPIADWKKR

SEQ ID NO: 613 - protein, 44 aa, Artificial Sequence
  Chemically Synthesized
KKRRGRKPKKKDDPKMELKDEVKDLKDFVVEESTSASSSAPKKR

SEQ ID NO: 614 - protein, 32 aa, Artificial Sequence
  Chemically Synthesized
KKRLEKENRKIKEEDDEDSDDEDDEKAKKKKR

SEQ ID NO: 615 - protein, 44 aa, Artificial Sequence
  Chemically Synthesized
KKRKRGPKKKKFKPEVAGKAAETENDDVAAAPEEADPIAEAKKR

SEQ ID NO: 616 - protein, 46 aa, Artificial Sequence
  Chemically Synthesized
KKRKITDEKDAQHVPAEKREKVENWLKKSTEKPTSSQSDAEKKKKR

SEQ ID NO: 617 - protein, 29 aa, Artificial Sequence
  Chemically Synthesized
KKRDDNKDKEGSSMDKLREESRRQYLKKR

SEQ ID NO: 618 - protein, 35 aa, Artificial Sequence
  Chemically Synthesized
KKRVTSKSRTKRVKMFKQCQWVDADNQRDIKRKKR

SEQ ID NO: 619 - protein, 38 aa, Artificial Sequence
  Chemically Synthesized
KKRMTEKDISSSESSISESKSLNCSASNQNENEKRKKR

SEQ ID NO: 620 - protein, 35 aa, Artificial Sequence; identical to SEQ ID NO: 618
  Chemically Synthesized

SEQ ID NO: 621 - protein, 38 aa, Artificial Sequence; identical to SEQ ID NO: 619
  Chemically Synthesized

SEQ ID NO: 622 - protein, 35 aa, Artificial Sequence; identical to SEQ ID NO: 618
  Chemically Synthesized

SEQ ID NO: 623 - protein, 38 aa, Artificial Sequence; identical to SEQ ID NO: 619
  Chemically Synthesized

SEQ ID NO: 624 - protein, 35 aa, Artificial Sequence; identical to SEQ ID NO: 618
  Chemically Synthesized

SEQ ID NO: 625 - protein, 38 aa, Artificial Sequence; identical to SEQ ID NO: 619
  Chemically Synthesized

SEQ ID NO: 626 - protein, 34 aa, Artificial Sequence
  Chemically Synthesized
KKRGRPKKPKDENESDYNNTSFSDSNTDGTPKKR

SEQ ID NO: 627 - protein, 30 aa, Artificial Sequence
  Chemically Synthesized
KKRGRPSKASVGGKSSTAAVAAISPGIKKR

SEQ ID NO: 628 - protein, 32 aa, Artificial Sequence
  Chemically Synthesized
KKRANRKKANNNKKRASNNRKKANNNNNNKKR

SEQ ID NO: 629 - protein, 41 aa, Artificial Sequence
  Chemically Synthesized
KKRDWYIQPTCARSGDGLYQGLDWLSDYIFDKKNKKKGKKR

SEQ ID NO: 630 - protein, 35 aa, Artificial Sequence
  Chemically Synthesized
KKRHLEDSLDMLNEEIVKLRAAEEIRLTDQEDKKR

SEQ ID NO: 631 - protein, 35 aa, Artificial Sequence
  Chemically Synthesized
KKRNNVFLTITDVIGRVVVSQSAGSCKITTKKKKR

SEQ ID NO: 632 - protein, 44 aa, Artificial Sequence
  Chemically Synthesized
KKRYYLFFSKKRNNVFLTITDVIGRVVVSQSAGSCKITTKKKKR

SEQ ID NO: 633 - protein, 37 aa, Artificial Sequence
  Chemically Synthesized
KKREIEIQQQLELQEETTLEIRERNVSLEQEVELKKR

SEQ ID NO: 634 - protein, 43 aa, Artificial Sequence
  Chemically Synthesized
KKRWFILKGGDLSYYKTKGELVPLGVIHLNTSGHIKNSDRKKR

SEQ ID NO: 635 - protein, 45 aa, Artificial Sequence
  Chemically Synthesized
KKRPNRLIIDQSDNDDNSMVMLSQAKMDELGLFRGDSVILKGKKR

SEQ ID NO: 636 - protein, 31 aa, Artificial Sequence
  Chemically Synthesized
KKRKGKGKKRGKGRRRGSKGRKKKKGKGKKR

SEQ ID NO: 637 - protein, 35 aa, Artificial Sequence
  Chemically Synthesized
KKRARSPSKKARRRSRSTKKTAAKRRKRSSSPKKR

SEQ ID NO: 638 - protein, 26 aa, Artificial Sequence
  Chemically Synthesized
KKREAEKKKCAKLAKKEKEAAEKKKR

SEQ ID NO: 639 - protein, 27 aa, Artificial Sequence
  Chemically Synthesized
KKRCKDLAKNKKKGHKKKGRNENRKKR

SEQ ID NO: 640 - protein, 35 aa, Artificial Sequence
  Chemically Synthesized
KKRKEAAEKKKCEKAAKKRKEAAEKKKCEKSAKKR

SEQ ID NO: 641 - protein, 35 aa, Artificial Sequence
  Chemically Synthesized
KKRKEEAEKKKCEKTAKKRKEAAEKKKCEKAAKKR

SEQ ID NO: 642 - protein, 35 aa, Artificial Sequence
  Chemically Synthesized
KKRKEAAEKKKCEKAAKKRKEEAEKKKCEKTAKKR

SEQ ID NO: 643 - protein, 35 aa, Artificial Sequence
  Chemically Synthesized
KKRKEEAEKKKCEKTAKKRKETAEKKKCEKAAKKR

SEQ ID NO: 644 - protein, 35 aa, Artificial Sequence
  Chemically Synthesized
KKRKETAEKKKCEKAAKKRKQAAEKKKCEKAAKKR

SEQ ID NO: 645 - protein, 29 aa, Artificial Sequence
  Chemically Synthesized
KKRGSKTSELKQNETTDAVVVNNEKVKKR

SEQ ID NO: 646 - protein, 26 aa, Artificial Sequence
  Chemically Synthesized
KKRKSAIDVLKMPLFDILRSSPPKKR

SEQ ID NO: 647 - protein, 42 aa, Artificial Sequence
  Chemically Synthesized
KKRFNLNLEEARQAFQTFKPDWNKIRYDAMKMQTSLGQMKKR

SEQ ID NO: 648 - protein, 38 aa, Artificial Sequence
  Chemically Synthesized
KKRSDKRARSESKSRSRSGGRRSRSNSPPNRSPSPKKR

SEQ ID NO: 649 - protein, 34 aa, Artificial Sequence
  Chemically Synthesized
KKRGVVLKPSVDEETDRRRMLNRIAAVRYREKKR

SEQ ID NO: 650 - protein, 36 aa, Artificial Sequence
  Chemically Synthesized
KKRFHEMAEKDKQRYEAEMQNYVPPKGAVVGRGKKR

SEQ ID NO: 651 - protein, 36 aa, Artificial Sequence
  Chemically Synthesized
KKRQHSSRSNESVSSSTSTEKSHKKTKKTKMKEKKR

SEQ ID NO: 652 - protein, 37 aa, Artificial Sequence; identical to SEQ ID NO: 633
  Chemically Synthesized

SEQ ID NO: 653 - protein, 30 aa, Artificial Sequence
  Chemically Synthesized
KKRMDDFVSQVGEDRLATYKPFTEDPSKKR

SEQ ID NO: 654 - protein, 28 aa, Artificial Sequence
  Chemically Synthesized
KKRSKKRNSIDSGRKDKSKKRKSKKKKR

SEQ ID NO: 655 - protein, 31 aa, Artificial Sequence
  Chemically Synthesized
KKRDSKNRRSHSKSDENEEGEEDDEERRKKR

SEQ ID NO: 656 - protein, 42 aa, Artificial Sequence
  Chemically Synthesized
KKRLFEDFTNLYIEDDCLLSCSFSFFIYNKSIHLHFNVDKKR

SEQ ID NO: 657 - protein, 26 aa, Artificial Sequence
  Chemically Synthesized
KKRIPNATEEEIEILEGMLCWNPKKR

SEQ ID NO: 658 - protein, 46 aa, Artificial Sequence
  Chemically Synthesized
KKRKKDRDHNNNNNNNNNNNNNNNEQTSDSSDSSDSDSESRSKKKR

SEQ ID NO: 659 - protein, 26 aa, Artificial Sequence
  Chemically Synthesized
KKRAAEQKIIDDEKARLKSIENSKKR

SEQ ID NO: 660 - protein, 38 aa, Artificial Sequence
  Chemically Synthesized
KKRKCNFSSPLLFSPFKYGVTSPFSPSKMKLKSPFKKR

SEQ ID NO: 661 - protein, 36 aa, Artificial Sequence
  Chemically Synthesized
KKRLKREKRLKEKQDLLLIKLEKQKEKQLEEQMKKR

SEQ ID NO: 662 - protein, 27 aa, Artificial Sequence
  Chemically Synthesized
KKRIKFTHMVGRGQYGKVYDALYDKKR

SEQ ID NO: 663 - protein, 35 aa, Artificial Sequence
  Chemically Synthesized
KKRREKEARKMKRAGGRFKSRATGANAEEKRAKKR

SEQ ID NO: 664 - protein, 39 aa, Artificial Sequence
  Chemically Synthesized
KKRLQKEEQDRLAAAELERKRLEKEAEEKRIAQELEKKR

SEQ ID NO: 665 - protein, 31 aa, Artificial Sequence
  Chemically Synthesized
KKRKITSSEYGMSLEFFKKNPKKVVQNLKKR

SEQ ID NO: 666 - protein, 41 aa, Artificial Sequence
  Chemically Synthesized
KKRDLIKNNKLIHNVDVNYINMITNDNHISSEKCRDIKKKR

SEQ ID NO: 667 - protein, 46 aa, Artificial Sequence
  Chemically Synthesized
KKRIYGYLFYTTLLKNITSLNNLFVHYILNNYFFFHSKSMYMLKKR

SEQ ID NO: 668 - protein, 31 aa, Artificial Sequence
  Chemically Synthesized
KKRIFIYENTVYYTPDDCVFCTQLNCTIKKR

SEQ ID NO: 669 - protein, 44 aa, Artificial Sequence
  Chemically Synthesized
KKRRNEETRSARSVGIAAADARQAAIVAEKTSGPSLLEIHQKKR

SEQ ID NO: 670 - protein, 39 aa, Artificial Sequence
  Chemically Synthesized
KKRPGTTSKKSIATVTASPEMSSKTTQMEPEQDGEGKKR

SEQ ID NO: 671 - protein, 29 aa, Artificial Sequence
  Chemically Synthesized
KKRLARGGHVEDPTADPLDISLPSSKKKR

SEQ ID NO: 672 - protein, 27 aa, Artificial Sequence
  Chemically Synthesized
KKRSDESDDDNIGLVARGSPRFFGKKR

SEQ ID NO: 673 - protein, 45 aa, Artificial Sequence
  Chemically Synthesized
KKRADDEDILLGERGSPRFFGKKRANDENISFSLRGSPRFFGKKR

SEQ ID NO: 674 - protein, 46 aa, Artificial Sequence
  Chemically Synthesized
KKRSDDNVALDLRGSPRFFGKRQSSDLDDEISVALRGSPRFFGKKR

SEQ ID NO: 675 - protein, 34 aa, Artificial Sequence
  Chemically Synthesized
KKRTEDGRPTLSAHPARFSPEDKYSRQRLTIKKR

SEQ ID NO: 676 - protein, 32 aa, Artificial Sequence
  Chemically Synthesized
KKRRVEKKKSKTKWTERKQKVEHDKEKRQKKR

SEQ ID NO: 677 - protein, 37 aa, Artificial Sequence
  Chemically Synthesized
KKRPRQPRKRIVMVEEVKRKIRTPIKEEEEVQERKKR

SEQ ID NO: 678 - protein, 33 aa, Artificial Sequence
  Chemically Synthesized
KKRVQILYIESESEDEDEQDSHDKSLDSPEKKR

SEQ ID NO: 679 - protein, 34 aa, Artificial Sequence
  Chemically Synthesized
KKRKRGVVNTKAYKETKPAVKKETKATPALHKKR

SEQ ID NO: 680 - protein, 40 aa, Artificial Sequence
  Chemically Synthesized
KKRKCVITLDEKQVESKRLKKEESNVEATSRPPAQSPKKR

SEQ ID NO: 681 - protein, 37 aa, Artificial Sequence
  Chemically Synthesized
KKRKKPQTAAKSSSRSDSDSDWANNKAGAPSSKKKKR

SEQ ID NO: 682 - protein, 39 aa, Artificial Sequence
  Chemically Synthesized
KKRKRKEEGEKEKKPRKKVPKQLGVMALNSHKSEKKKKR

SEQ ID NO: 683 - protein, 33 aa, Artificial Sequence
  Chemically Synthesized
KKRKKVSGPNPLSCLKKKKKTQDTNSSASEKKR

SEQ ID NO: 684 - protein, 33 aa, Artificial Sequence; identical to SEQ ID NO: 566
  Chemically Synthesized

SEQ ID NO: 685 - protein, 40 aa, Artificial Sequence
  Chemically Synthesized
KKRLEDEQEMVRMVRAATLIQALWKGYLVRSMLKSKKKKR

SEQ ID NO: 686 - protein, 32 aa, Artificial Sequence
  Chemically Synthesized
KKRSREDVGDNDDTEGAIGVRNKVAGGKMKKR

SEQ ID NO: 687 - protein, 39 aa, Artificial Sequence
  Chemically Synthesized
KKREEMEEENRKIIEFAKLQQQREEDRMAKVQEKVKKKR

SEQ ID NO: 688 - protein, 31 aa, Artificial Sequence
  Chemically Synthesized
KKRRQYQEEEVLDGPGVNTAQKAKKKKQKKR

SEQ ID NO: 689 - protein, 37 aa, Artificial Sequence
  Chemically Synthesized
KKRKQKEEEEPTTTERSAEKYSEHTDESIRKSKKKKR

SEQ ID NO: 690 - protein, 41 aa, Artificial Sequence
  Chemically Synthesized
KKREGSSAQAPASKKPKEEIPVIPKGKPKSGRVWKDRSKKR

SEQ ID NO: 691 - protein, 26 aa, Artificial Sequence
  Chemically Synthesized
KKRKLDPEIVPEEKDCGDDEGNSKKR

SEQ ID NO: 692 - protein, 39 aa, Artificial Sequence
  Chemically Synthesized
KKRMEAEQEMVRMVRAATLIQAFWKGYLVRSLLRSKKKR

SEQ ID NO: 693 - protein, 45 aa, Artificial Sequence
  Chemically Synthesized
KKRSTSVMSFFSKVSWNLRLQKQEPLKNVFFILAETARDPSVKKR

SEQ ID NO: 694 - protein, 41 aa, Artificial Sequence
  Chemically Synthesized
KKRHKKEKRKKEKDRGRRLDSSLAPAPIQHDSDSSTCCKKR

SEQ ID NO: 695 - protein, 40 aa, Artificial Sequence
  Chemically Synthesized
KKRIERFYHCLQHALEKETVSTTSQPKEKVNTSYIRKKKR

SEQ ID NO: 696 - protein, 33 aa, Artificial Sequence; identical to SEQ ID NO: 566
  Chemically Synthesized

SEQ ID NO: 697 - protein, 27 aa, Artificial Sequence
  Chemically Synthesized
KKRKERFGIVTSSAGTGTTEDTEAKKR

SEQ ID NO: 698 - protein, 29 aa, Artificial Sequence
  Chemically Synthesized
KKRKKGEKQIPGEEKGRKRRRVKEDKKKR

SEQ ID NO: 699 - protein, 42 aa, Artificial Sequence
  Chemically Synthesized
KKRKGSSSLAPASKKLNKEELPVIPKGKPKSGRVWKDRSKKR

SEQ ID NO: 700 - protein, 45 aa, Artificial Sequence; identical to SEQ ID NO: 556
  Chemically Synthesized

SEQ ID NO: 701 - protein, 35 aa, Artificial Sequence
  Chemically Synthesized
KKRKDEGKSRTTPPERPLTEVKAETRAEEAPEKKR

SEQ ID NO: 702 - protein, 35 aa, Artificial Sequence
  Chemically Synthesized
KKRKEEGKSRTTPPERPLTEVKAETRAEEAPEKKR

SEQ ID NO: 703 - protein, 35 aa, Artificial Sequence; identical to SEQ ID NO: 561
  Chemically Synthesized

SEQ ID NO: 704 - protein, 35 aa, Artificial Sequence; identical to SEQ ID NO: 561
  Chemically Synthesized

SEQ ID NO: 705 - protein, 35 aa, Artificial Sequence; identical to SEQ ID NO: 588
  Chemically Synthesized

SEQ ID NO: 706 - protein, 43 aa, Artificial Sequence
  Chemically Synthesized
KKRKALEAKKEEEEIQREMVKLRREIIERRRTVKEAWKIEKKR

SEQ ID NO: 707 - protein, 41 aa, Artificial Sequence; identical to SEQ ID NO: 562
  Chemically Synthesized

SEQ ID NO: 708 - protein, 37 aa, Artificial Sequence
  Chemically Synthesized
KKRILESHNNTLVDPCEEHKKKNPDASVKFSEFLKKR

SEQ ID NO: 709 - protein, 34 aa, Artificial Sequence
  Chemically Synthesized
KKRLRMLAVLGVELVFMLAVILGVLLGAHTHKKR

SEQ ID NO: 710 - protein, 37 aa, Artificial Sequence
  Chemically Synthesized
KKRKRGDDDYALPGDGDLVVECEEEGEKGEKRVKKKR

SEQ ID NO: 711 - protein, 40 aa, Artificial Sequence
  Chemically Synthesized
KKRKKRKRGDDDYALPGDGDLVVECEEEGEKGEKRVKKKR

SEQ ID NO: 712 - protein, 43 aa, Artificial Sequence
  Chemically Synthesized
KKRKRGDDDYALPGDGDLVVECEEEGEKGEKRVKKKRRSRKKR

SEQ ID NO: 713 - protein, 46 aa, Artificial Sequence
  Chemically Synthesized
KKRKKRKRGDDDYALPGDGDLVVECEEEGEKGEKRVKKKRRSRKKR

SEQ ID NO: 714 - protein, 37 aa, Artificial Sequence; identical to SEQ ID NO: 710
  Chemically Synthesized

SEQ ID NO: 715 - protein, 40 aa, Artificial Sequence; identical to SEQ ID NO: 711
  Chemically Synthesized

SEQ ID NO: 716 - protein, 43 aa, Artificial Sequence; identical to SEQ ID NO: 712
  Chemically Synthesized

SEQ ID NO: 717 - protein, 46 aa, Artificial Sequence; identical to SEQ ID NO: 713
  Chemically Synthesized

SEQ ID NO: 718 - protein, 28 aa, Artificial Sequence
  Chemically Synthesized
KKRNPESALLNQEKNIEENYAESTIKKR

SEQ ID NO: 719 - protein, 28 aa, Artificial Sequence
  Chemically Synthesized
KKRNPESALSNQEKNIEKNYAESKIKKR

SEQ ID NO: 720 - protein, 45 aa, Artificial Sequence
  Chemically Synthesized
KKRDKGEKKDFCFLTVWGMETELPFGSAQKKPSFFEPISKELKKR

SEQ ID NO: 721 - protein, 28 aa, Artificial Sequence
  Chemically Synthesized
KKRNPESALLNQEKNIEENFAESMIKKR

SEQ ID NO: 722 - protein, 31 aa, Artificial Sequence
  Chemically Synthesized
KKRQDKKNPGSDAQNQKDVEEDSTRSDSKKR

SEQ ID NO: 723 - protein, 28 aa, Artificial Sequence
  Chemically Synthesized
KKRKKKDEGLDEDDYLLLQDNNVKFKKR

SEQ ID NO: 724 - protein, 27 aa, Artificial Sequence
  Chemically Synthesized
KKRKSLERYGSITSAVSDDKGDTTKKR

SEQ ID NO: 725 - protein, 39 aa, Artificial Sequence
  Chemically Synthesized
KKRHYGGESSLAGTQSSIIMRTAAEMLAVYQACGIKKKR

SEQ ID NO: 726 - protein, 36 aa, Artificial Sequence
  Chemically Synthesized
KKRGRNIDDAEEVENELKRVEDELYKIPDHLKVKKR

SEQ ID NO: 727 - protein, 27 aa, Artificial Sequence
  Chemically Synthesized
KKREEEAEQARKREEEREKEEEMAKKR

SEQ ID NO: 728 - protein, 32 aa, Artificial Sequence
  Chemically Synthesized
KKREEEEARKREEERKREEEEAKRREEERKKR

SEQ ID NO: 729 - protein, 44 aa, Artificial Sequence
  Chemically Synthesized
KKRRGRPRKYGPDSGEMSLGLNPGAPSFTVSQPSSGGDGGEKKR

SEQ ID NO: 730 - protein, 34 aa, Artificial Sequence
  Chemically Synthesized
KKRQDFVKDRRWIKREYDEFKVRINGLPEQIKKR

SEQ ID NO: 731 - protein, 44 aa, Artificial Sequence
  Chemically Synthesized
KKRKLETCDETWKREVVQAEEAKGGGEQKSESKKAKKQDKEKKR

SEQ ID NO: 732 - protein, 30 aa, Artificial Sequence
  Chemically Synthesized
KKRKPREWWKEEFCEELTRKKRKKKKKKKR

SEQ ID NO: 733 - protein, 37 aa, Artificial Sequence
  Chemically Synthesized
KKRGLSSISSIDSWFHRDDGASSVHDHNLNPTKRKKR

SEQ ID NO: 734 - protein, 45 aa, Artificial Sequence
  Chemically Synthesized
KKRKKKKKKKRGLSSISSIDSWFHRDDGASSVHDHNLNPTKRKKR

SEQ ID NO: 735 - protein, 27 aa, Artificial Sequence
  Chemically Synthesized
KKRRRATKKPYSRSIVGATLEVIQKKR

SEQ ID NO: 736 - protein, 37 aa, Artificial Sequence
  Chemically Synthesized
KKRVDSVVIGRSSKARRGHREPRKARSSGRLEAEKKR

SEQ ID NO: 737 - protein, 45 aa, Artificial Sequence
  Chemically Synthesized
KKRNKKFTISIKLFKKFYKNKLNENGEYKIESQILQNEKELNKKR

SEQ ID NO: 738 - protein, 39 aa, Artificial Sequence
  Chemically Synthesized
KKRIYLISDRNPSTGETGWYDKDKGRESKKGIWQIFKKR

SEQ ID NO: 739 - protein, 37 aa, Artificial Sequence
  Chemically Synthesized
KKRIAKAKSEAAEYQKLLASRLKEQREKRSESLAKKR

SEQ ID NO: 740 - protein, 27 aa, Artificial Sequence
  Chemically Synthesized
KKRRRTTKKPYSRSIVGATLEVIQKKR

SEQ ID NO: 741 - protein, 45 aa, Artificial Sequence
  Chemically Synthesized
KKRRAKVFKLAKGFKGAHNSLFRTAKQQVLKALRYSYVGRKRKKR

SEQ ID NO: 742 - protein, 37 aa, Artificial Sequence
  Chemically Synthesized
KKRIAKANSDAADYQKLLASRLKEQRDRRSESLAKKR

SEQ ID NO: 743 - protein, 29 aa, Artificial Sequence
  Chemically Synthesized
KKRFLDEMNKKKSCLKMVAQFFFQFKKKR

SEQ ID NO: 744 - protein, 43 aa, Artificial Sequence
  Chemically Synthesized
KKRTNLKKGPQSKLTKKKKERKVDKTRAIINEIERVLKEKKKR

SEQ ID NO: 745 - protein, 46 aa, Artificial Sequence
  Chemically Synthesized
KKRFLDEMNKKKSCLKMVAQFFFQFKKKRKNKKIDKAIKGINKKKR

SEQ ID NO: 746 - protein, 32 aa, Artificial Sequence
  Chemically Synthesized
KKRNKMQDLTNRANKARNEIERIRKEKKKKKR

SEQ ID NO: 747 - protein, 34 aa, Artificial Sequence
  Chemically Synthesized
KKRASVRKICQKCRLTRRRGRIRVICSNPRHKKR

SEQ ID NO: 748 - protein, 29 aa, Artificial Sequence
  Chemically Synthesized
KKRRTLQEWQIQPKKYLLEKHNIKVLKKR

SEQ ID NO: 749 - protein, 45 aa, Artificial Sequence
  Chemically Synthesized
KKRRAKIFKLAKGFKGAHKCLFRTAKQQVLKALRYSYVGRKRKKR

SEQ ID NO: 750 - protein, 46 aa, Artificial Sequence
  Chemically Synthesized
KKRLTAAQVLEHTWILNAKKAPNVSLGETVKARLKQFSVMNKLKKR

SEQ ID NO: 751 - protein, 29 aa, Artificial Sequence
  Chemically Synthesized
KKRLTLKHRIEIVMGIICMIVAGFQEKKR

SEQ ID NO: 752 - protein, 28 aa, Artificial Sequence
  Chemically Synthesized
KKRIDNFKKEALLKANPQIQANPQLKKR

SEQ ID NO: 753 - protein, 46 aa, Artificial Sequence
  Chemically Synthesized
KKRLSAAQVLEHSWIQNAKKAPNVSLGETVKARLKQFSVMNKLKKR

SEQ ID NO: 754 - protein, 28 aa, Artificial Sequence
  Chemically Synthesized
KKRRGRPRKYEANGAPLPSSSVPLVKKR

SEQ ID NO: 755 - protein, 36 aa, Artificial Sequence
  Chemically Synthesized
KKRGYNGKVIALIVALSTVISIMLVLLFLFMMYKKR

SEQ ID NO: 756 - protein, 27 aa, Artificial Sequence
  Chemically Synthesized
KKRDASFVQPDERTAQTFSTKNKEKKR

SEQ ID NO: 757 - protein, 33 aa, Artificial Sequence
  Chemically Synthesized
KKRKLEAEAEVVVVEAAAATSTDEATKSSKKKR

SEQ ID NO: 758 - protein, 46 aa, Artificial Sequence
  Chemically Synthesized
KKRSRATSTDKNKRARVNKRAQKNVEMSGDNNEGEEEEGETKLKKR

SEQ ID NO: 759 - protein, 27 aa, Artificial Sequence
  Chemically Synthesized
KKRVSDESDSDSDSGDRKRRRRSMKKR

SEQ ID NO: 760 - protein, 45 aa, Artificial Sequence
  Chemically Synthesized
KKRKRSKPLRPAPSRVLRSTSEKKNKAHNELLNDGAGVQPAEKKR

SEQ ID NO: 761 - protein, 26 aa, Artificial Sequence
  Chemically Synthesized
KKRKRSSKKDKHRRSKQRDKRHEKKR

SEQ ID NO: 762 - protein, 44 aa, Artificial Sequence
  Chemically Synthesized
KKRSMRDKRPKRKSRRSPDSLEDSNSGSEASLSDVNVEIGAKKR

SEQ ID NO: 763 - protein, 41 aa, Artificial Sequence
  Chemically Synthesized
KKRKSKKNKRHKKHSSRTVEETDESSTGSEDSREKRGSKKR

SEQ ID NO: 764 - protein, 40 aa, Artificial Sequence
  Chemically Synthesized
KKREEQLEKARLAMERKRKLHEKAAAKAVIRVKKEAEKKR

SEQ ID NO: 765 - protein, 34 aa, Artificial Sequence
  Chemically Synthesized
KKRLRMLAVLGVELVFMLAVILGVLLSAHTHKKR

SEQ ID NO: 766 - protein, 44 aa, Artificial Sequence
  Chemically Synthesized
KKRKGSETEGWENLPDDLSCSTASRSSNFRSHFSLEGYARLKKR

SEQ ID NO: 767 - protein, 41 aa, Artificial Sequence
  Chemically Synthesized
KKRVYKDKSRCYECGDEGHLSYECPKNQLGPRERPPPPKKR

SEQ ID NO: 768 - protein, 29 aa, Artificial Sequence
  Chemically Synthesized
KKRMEALNLPKLSQILNSTSVKISPMKKR

SEQ ID NO: 769 - protein, 30 aa, Artificial Sequence
  Chemically Synthesized
KKRSIPRTPEKKMVDVKRVHIQRRGVGKKR

SEQ ID NO: 770 - protein, 26 aa, Artificial Sequence
  Chemically Synthesized
KKRVKTQCVIKSSDKSDHDTLLKKKR

SEQ ID NO: 771 - protein, 27 aa, Artificial Sequence
  Chemically Synthesized
KKRVYRLVKASDVKSKEHVKNKSGKKR

SEQ ID NO: 772 - protein, 27 aa, Artificial Sequence
  Chemically Synthesized
KKRPGVSPGDRSGGKGRPTSRMGNKKR

SEQ ID NO: 773 - protein, 36 aa, Artificial Sequence
  Chemically Synthesized
KKRNTCSVSSQTRKVSLKISKINGVGVRCTPNSKKR

SEQ ID NO: 774 - protein, 37 aa, Artificial Sequence
  Chemically Synthesized
KKRQDKLEMSEIKQFFDRPIMKAAKELNVGLTVLKKR

SEQ ID NO: 775 - protein, 43 aa, Artificial Sequence
  Chemically Synthesized
KKRNLKKKRQDKLEMSEIKQFFDRPIMKAAKELNVGLTVLKKR

SEQ ID NO: 776 - protein, 29 aa, Artificial Sequence
  Chemically Synthesized
KKRKLYDAMKISQSRKRSGVEIIEQRKKR

SEQ ID NO: 777 - protein, 36 aa, Artificial Sequence
  Chemically Synthesized
KKRGYNSQVLALIVALSGVTVILLALLFFFVMYKKR

SEQ ID NO: 778 - protein, 39 aa, Artificial Sequence
  Chemically Synthesized
KKRQPEFRMLGKDHLSDQESVEVRVPDSIKKPIDSSKKR

SEQ ID NO: 779 - protein, 37 aa, Artificial Sequence
  Chemically Synthesized
KKRVAKAKSEAAEYQKLLASRLKEQRDRRSESLAKKR

SEQ ID NO: 780 - protein, 29 aa, Artificial Sequence
  Chemically Synthesized
KKRKEETVLLPSGVQGLGMGLPDMRSKKR

SEQ ID NO: 781 - protein, 39 aa, Artificial Sequence
  Chemically Synthesized
KKRVKKLKSKKLEAEEELNNVQEIDAHDIVMEQKSDKKR

SEQ ID NO: 782 - protein, 38 aa, Artificial Sequence
  Chemically Synthesized
KKRKKTPNGDPQRLGIDTLLPQCLRGAPAAARRKRKKR

SEQ ID NO: 783 - protein, 36 aa, Artificial Sequence
  Chemically Synthesized
KKRRAPPPPSPGLLGQDKVSEKASLSSQADLQKKKR

SEQ ID NO: 784 - protein, 39 aa, Artificial Sequence; identical to SEQ ID NO: 580
  Chemically Synthesized

SEQ ID NO: 785 - protein, 42 aa, Artificial Sequence
  Chemically Synthesized
KKRMRLEEENEGLRQRLIETELAKQVLQTELDRPREHSLKKR

SEQ ID NO: 786 - protein, 33 aa, Artificial Sequence
  Chemically Synthesized
KKRAKMGKLKDKFKTELESTSEILGFDVKTKKR

SEQ ID NO: 787 - protein, 45 aa, Artificial Sequence
  Chemically Synthesized
KKRKKLKSEGTTSEKKAASQQDAVTEGAMPAATGKDQPPSTGKKR

SEQ ID NO: 788 - protein, 33 aa, Artificial Sequence
  Chemically Synthesized
KKRKEEERKKKETDQKKEAAVSVQEESDLEKKR

SEQ ID NO: 789 - protein, 29 aa, Artificial Sequence
  Chemically Synthesized
KKRKKGEKQAPGEEKGRKRRRVKEDKKKR

SEQ ID NO: 790 - protein, 36 aa, Artificial Sequence
  Chemically Synthesized
KKRSFSGFGSPLDRLSAGSVEHRGKQRKAVDHSKKR

SEQ ID NO: 791 - protein, 36 aa, Artificial Sequence
  Chemically Synthesized
KKRSFSGFGSPLDRLSAGSVEHRGKQRRVVDHSKKR

SEQ ID NO: 792 - protein, 27 aa, Artificial Sequence
  Chemically Synthesized
KKRVGDSSALQTIHGKEMSKIARKKKR

SEQ ID NO: 793 - protein, 27 aa, Artificial Sequence
  Chemically Synthesized
KKRVGDSSALQTIHGKEMSKIARKKKR

SEQ ID NO: 794 - protein, 41 aa, Artificial Sequence; identical to SEQ ID NO: 562
  Chemically Synthesized

SEQ ID NO: 795 - protein, 39 aa, Artificial Sequence
  Chemically Synthesized
KKRDKVEASSLPEARAGKRERCSAEDEDCLPPRPKAKKR

SEQ ID NO: 796 - protein, 45 aa, Artificial Sequence
  Chemically Synthesized
KKRRKKSSGERLKEEKPKKSKTAAASKTKGKSKLNTITPVVGKKR

SEQ ID NO: 797 - protein, 39 aa, Artificial Sequence
  Chemically Synthesized
KKRKQKEGEEAATTEKSLGDELLGHTDRSFRDSRKKKKR

SEQ ID NO: 798 - protein, 44 aa, Artificial Sequence
  Chemically Synthesized
KKRQKAERQGTAIGSEEEEAAGESGPRELSTEQSDQPSRKKKKR

SEQ ID NO: 799 - protein, 46 aa, Artificial Sequence
  Chemically Synthesized
KKRRKQRHEEDGEMGVCDEGGRDVTSRPKAVNSGGDKDPRRSSKKR

SEQ ID NO: 800 - protein, 33 aa, Artificial Sequence
  Chemically Synthesized
KKRTKMGKLKDKFKTELESTSEIIGFDVKTKKR

SEQ ID NO: 801 - protein, 45 aa, Artificial Sequence
  Chemically Synthesized
KKREQTASAPATPLVSKHRPSFTRSNTISKPYISNTLPSDAPKKR

SEQ ID NO: 802 - protein, 27 aa, Artificial Sequence
  Chemically Synthesized
KKRKERFGIVTSSAGTGTTEDTEAKKR

SEQ ID NO: 803 - protein, 42 aa, Artificial Sequence
  Chemically Synthesized
KKRPKGYVQTRTGRTSLKNSSETVGQKRKKAEETKGLPPKKR

SEQ ID NO: 804 - protein, 33 aa, Artificial Sequence
  Chemically Synthesized
KKRQRLIDVQDELIRLEPQLKQLQTKYDDLKKR

SEQ ID NO: 805 - protein, 45 aa, Artificial Sequence
  Chemically Synthesized
KKRKMYEDKPLSSESLSESDCGEVQAKKKKSGEERERTTDKAKKR

SEQ ID NO: 806 - protein, 31 aa, Artificial Sequence
  Chemically Synthesized
KKRVKQFKNKPQGGKGPKDKFQKANKFNKKR

SEQ ID NO: 807 - protein, 36 aa, Artificial Sequence
  Chemically Synthesized
KKRQTCEEDLDTQDEEDKDDLTKKERKVRKKDKKKR

SEQ ID NO: 808 - protein, 44 aa, Artificial Sequence
  Chemically Synthesized
KKRQQYCEEVLDVSNKDDGRTWEAEDGGERSQPHPKARAKKKKR

SEQ ID NO: 809 - protein, 46 aa, Artificial Sequence
  Chemically Synthesized
KKRRRRHHEEEEEMGVCDEGGRDVTGGPKAVNSGADTDPWRSSKKR

SEQ ID NO: 810 - protein, 46 aa, Artificial Sequence
  Chemically Synthesized
KKRSSIWQFFSRLFSSSSNATKKPEPPVNLKYNAPTSHVTPSVKKR

SEQ ID NO: 811 - protein, 36 aa, Artificial Sequence
  Chemically Synthesized
KKRRAPPPPSPKLLGQDKVSEKASLSSQADLQKKKR

SEQ ID NO: 812 - protein, 32 aa, Artificial Sequence
  Chemically Synthesized
KKRKALEFVTNPDIAAKKKLKKHKNKSEAKKR

SEQ ID NO: 813 - protein, 39 aa, Artificial Sequence
  Chemically Synthesized
KKRDKVETGGLPESKAGKRERSSAEDEDCLPPRPKLKKR

SEQ ID NO: 814 - protein, 41 aa, Artificial Sequence
  Chemically Synthesized
KKRVIASPQAPASKKLKEELPVIPKGKPKSGRVWKDRSKKR

SEQ ID NO: 815 - protein, 40 aa, Artificial Sequence
  Chemically Synthesized
KKRVEAEREMVRMVRAATLIQAMWKGYLVRSMLRSRKKKR

SEQ ID NO: 816 - protein, 27 aa, Artificial Sequence
  Chemically Synthesized
KKRSLKLTEGKSLVDGNGEKPVMKKKR

SEQ ID NO: 817 - protein, 28 aa, Artificial Sequence
  Chemically Synthesized
KKRRRRPPKGEEGSEEEETENGPKPKKR

SEQ ID NO: 818 - protein, 37 aa, Artificial Sequence
  Chemically Synthesized
KKRGGGGGRRSKKGGEFDEFVNDDTDDDLPVSKKKKR

SEQ ID NO: 819 - protein, 28 aa, Artificial Sequence
  Chemically Synthesized
KKRRREPQTPAQETLESEWPQKAKKKKR

SEQ ID NO: 820 - protein, 33 aa, Artificial Sequence; identical to SEQ ID NO: 788
  Chemically Synthesized

SEQ ID NO: 821 - protein, 36 aa, Artificial Sequence
  Chemically Synthesized
KKRSAGIIEDVGGEVQNMLEKFGADINKALLAKKKR

SEQ ID NO: 822 - protein, 45 aa, Artificial Sequence; identical to SEQ ID NO: 555
  Chemically Synthesized

SEQ ID NO: 823 - protein, 31 aa, Artificial Sequence
  Chemically Synthesized
KKRAATTVLQELKKLPPLPVIEKPKLFFKKR

SEQ ID NO: 824 - protein, 29 aa, Artificial Sequence
  Chemically Synthesized
KKRKKGQEAGHEAGGEDAAEANGAPEKKR

SEQ ID NO: 825 - protein, 45 aa, Artificial Sequence; identical to SEQ ID NO: 555
  Chemically Synthesized

SEQ ID NO: 826 - protein, 34 aa, Artificial Sequence
  Chemically Synthesized
KKRKRYFMQEEMEAKTMEPVAELPVPSATSSKKR

SEQ ID NO: 827 - protein, 37 aa, Artificial Sequence
  Chemically Synthesized
KKRKKSKGTETSQVEHTEPVAQTEPPEGTFLFPTKKR

SEQ ID NO: 828 - protein, 43 aa, Artificial Sequence
  Chemically Synthesized
KKRKRQKEADGTEEVDGIVADSQPQVIVEAQEETILLSPTKKR

SEQ ID NO: 829 - protein, 31 aa, Artificial Sequence
  Chemically Synthesized
KKRHQEDQDPIFQASDSSGYQSDHNKKKKKR

SEQ ID NO: 830 - protein, 45 aa, Artificial Sequence
  Chemically Synthesized
KKRHQEDQDPIFQASDSSGYQSDHNKKKKKRKHSEEANFESPKKR

SEQ ID NO: 831 - protein, 45 aa, Artificial Sequence
  Chemically Synthesized
KKRRTPLLSFLSKVSWKLRLQKRELLKNALFVLAERARDPNAKKR

SEQ ID NO: 832 - protein, 46 aa, Artificial Sequence
  Chemically Synthesized
KKRKKLKSEGTTPEKNAASQQDAVTEGAMPAATGKDQPPSTGKKKR

SEQ ID NO: 833 - protein, 39 aa, Artificial Sequence; identical to SEQ ID NO: 580
  Chemically Synthesized

SEQ ID NO: 834 - protein, 26 aa, Artificial Sequence
  Chemically Synthesized
KKRLRNKRSRSRESSSRPRARKDKKR

SEQ ID NO: 835 - protein, 31 aa, Artificial Sequence
  Chemically Synthesized
KKRREKAIGEGRVVYIRNLSGDMSSRELKKR

SEQ ID NO: 836 - protein, 35 aa, Artificial Sequence
  Chemically Synthesized
KKRRRSPSYSPSPVKKKKKKSSKKHKRHRSFSKKR

SEQ ID NO: 837 - protein, 31 aa, Artificial Sequence; identical to SEQ ID NO: 598
  Chemically Synthesized

SEQ ID NO: 838 - protein, 31 aa, Artificial Sequence
  Chemically Synthesized
KKRGRTPKILIPHPTSTPSKSAEPLKFPKKR

SEQ ID NO: 839 - protein, 46 aa, Artificial Sequence
  Chemically Synthesized
KKRLDGIEEVEREINRGRSCKGSEFTCPEDNKIRELTLEIERLKKR

SEQ ID NO: 840 - protein, 38 aa, Artificial Sequence
  Chemically Synthesized
KKRFGGVQELLSQQKKSGEVAVLKRDGRYIYYLITKKR

SEQ ID NO: 841 - protein, 37 aa, Artificial Sequence
  Chemically Synthesized
KKRLRRMTPFWRGVSLRPIGASCRDDSECITRLCKKR

SEQ ID NO: 842 - protein, 46 aa, Artificial Sequence
  Chemically Synthesized
KKRLDGIEEVEREINRGRLCKGSEFTCPEDNKIRELTLEIERLKKR

SEQ ID NO: 843 - protein, 45 aa, Artificial Sequence
  Chemically Synthesized
KKRKMYEDKPLSSESLSESDCGEVQAKRKKSGEERERTTDKAKKR

SEQ ID NO: 844 - protein, 32 aa, Artificial Sequence
  Chemically Synthesized
KKRKREDAGDDDDKEGAIGVRNKVAGGKMKKR

SEQ ID NO: 845 - protein, 45 aa, Artificial Sequence
  Chemically Synthesized
KKRDRAELQPGGPSEDECSDASVEAAEDCVQTPDIQDDVPKPKKR

SEQ ID NO: 846 - protein, 27 aa, Artificial Sequence
  Chemically Synthesized
KKRKERFGIVTSSAGTGTTEDTEAKKR

SEQ ID NO: 847 - protein, 40 aa, Artificial Sequence
  Chemically Synthesized
KKRVEAEREMVRMVRAATLIQAVWKGYLVRSILRSKKKKR

SEQ ID NO: 848 - protein, 35 aa, Artificial Sequence
  Chemically Synthesized
KKRKLKADDTDNVYYNANRKNSKRLNVEVFIPKKR

SEQ ID NO: 849 - protein, 45 aa, Artificial Sequence; identical to SEQ ID NO: 796
  Chemically Synthesized

SEQ ID NO: 850 - protein, 39 aa, Artificial Sequence
  Chemically Synthesized
KKRKNISQDTFGTTFGRIHMQKQDLSKLQTRKMKGLKKR

SEQ ID NO: 851 - protein, 43 aa, Artificial Sequence
  Chemically Synthesized
KKRVIASPQAPASKKLKEKEELPVIPKGKPKSGRVWKDRSKKR

SEQ ID NO: 852 - protein, 37 aa, Artificial Sequence
  Chemically Synthesized
KKRQRSESHSASERSSSAESERSYKKSKKHKKKSKKR

SEQ ID NO: 853 - protein, 32 aa, Artificial Sequence
  Chemically Synthesized
KKRQLLDSDEEEDDEGRRQAVSGTPRVHRKKR

SEQ ID NO: 854 - protein, 39 aa, Artificial Sequence; identical to SEQ ID NO: 604
  Chemically Synthesized

SEQ ID NO: 855 - protein, 32 aa, Artificial Sequence
  Chemically Synthesized
KKREAAEKEKRARIAKERAEKERLERQQEKKR

SEQ ID NO: 856 - protein, 41 aa, Artificial Sequence
  Chemically Synthesized
KKRGRKPGSVVAAAAAEAKKKAVKESSIRSVHETVLPIKKR

SEQ ID NO: 857 - protein, 46 aa, Artificial Sequence
  Chemically Synthesized
KKRKRCGVCVPCLRKEPCGACYNCVNRSTSHQICKMRKCEQLKKKR

SEQ ID NO: 858 - protein, 46 aa, Artificial Sequence; identical to SEQ ID NO: 857
  Chemically Synthesized

SEQ ID NO: 859 - protein, 31 aa, Artificial Sequence
  Chemically Synthesized
KKRKRSSTRKASDETDSESETDSRESFKKKR

SEQ ID NO: 860 - protein, 34 aa, Artificial Sequence
  Chemically Synthesized
KKRKKKHPSKKERKGTIRDYECAETKQKKKHKKR

SEQ ID NO: 861 - protein, 26 aa, Artificial Sequence
  Chemically Synthesized
KKRRREHGQLWFPEGFIPKEPSKKKR

SEQ ID NO: 862 - protein, 32 aa, Artificial Sequence
  Chemically Synthesized
KKRMAAELYPVSDHATLQKSGAVMLSLPEKKR

SEQ ID NO: 863 - protein, 36 aa, Artificial Sequence
  Chemically Synthesized
KKRRAPAPPPAPTQTLPPTSQISLGSPSSHNLLKKR

SEQ ID NO: 864 - protein, 31 aa, Artificial Sequence
  Chemically Synthesized
KKRKHVKNEEDETNHEKTKQHLKEEKRRKKR

SEQ ID NO: 865 - protein, 46 aa, Artificial Sequence
  Chemically Synthesized
KKRSSLFSPRKSRKNGNAAAESGRETGKHKSLWKTVFSVYKKDKKR

SEQ ID NO: 866 - protein, 46 aa, Artificial Sequence
  Chemically Synthesized
KKRKRCGVCVPCLRKEPCGTCYNCVNRSTSHQICKMRKCEQLKKKR

SEQ ID NO: 867 - protein, 27 aa, Artificial Sequence
  Chemically Synthesized
KKRGLKPSGKRELAHPPSSEPPLPKKR

SEQ ID NO: 868 - protein, 33 aa, Artificial Sequence
  Chemically Synthesized
KKRKRHRSASRKGRHSGSSSRRKRKEDKKHKKR

SEQ ID NO: 869 - protein, 35 aa, Artificial Sequence
  Chemically Synthesized
KKRREERRKILEEEEQKKKQEEAERKIREEEEKKR

SEQ ID NO: 870 - protein, 35 aa, Artificial Sequence; identical to SEQ ID NO: 869
  Chemically Synthesized

SEQ ID NO: 871 - protein, 26 aa, Artificial Sequence
  Chemically Synthesized
KKRRREHGQLWFPDGFIPKEPSKKKR

SEQ ID NO: 872 - protein, 27 aa, Artificial Sequence
  Chemically Synthesized
KKRRRRDEDSDTEGEQQTQPDGEAKKR

SEQ ID NO: 873 - protein, 31 aa, Artificial Sequence
  Chemically Synthesized
KKRRRRDEDSDTEGEQQTQPDGEAKKRRKKR

SEQ ID NO: 874 - protein, 34 aa, Artificial Sequence
  Chemically Synthesized
KKRECAANGVDYERAKLLEISAEDAERWERKKKR

SEQ ID NO: 875 - protein, 39 aa, Artificial Sequence
  Chemically Synthesized
KKRDEERKRELEERRKKEQEEQLRRLREEEREEDEKKKR

SEQ ID NO: 876 - protein, 41 aa, Artificial Sequence
  Chemically Synthesized
KKRSSSRCRSGSDSPARKHSTLAKYRAEVPDRRKKERRKKR

SEQ ID NO: 877 - protein, 26 aa, Artificial Sequence
  Chemically Synthesized
KKRRKRPQKAAGSDDDEEQTPQSKKR

SEQ ID NO: 878 - protein, 30 aa, Artificial Sequence
  Chemically Synthesized
KKRKKGGSSSGEQGEGGDEGEGGEKKKKKR

SEQ ID NO: 879 - protein, 26 aa, Artificial Sequence
  Chemically Synthesized
KKRSYKDLLREEEEIAEQVRKSSKKR

SEQ ID NO: 880 - protein, 45 aa, Artificial Sequence
  Chemically Synthesized
KKRKVEKQIPDATKKKKATVKKECFITQERSEEKPDNESNKNKKR

SEQ ID NO: 881 - protein, 27 aa, Artificial Sequence
  Chemically Synthesized
KKRHDSPDLSPQEQQTTPDLSLQRKKR

SEQ ID NO: 882 - protein, 30 aa, Artificial Sequence
  Chemically Synthesized
KKRKFEKPPDPSVRKRLKLVKEEKLLRKKR

SEQ ID NO: 883 - protein, 27 aa, Artificial Sequence
  Chemically Synthesized
KKRRKRPQKGGDGSDDDEDQAPQPKKR

SEQ ID NO: 884 - protein, 32 aa, Artificial Sequence
  Chemically Synthesized
KKRRKRPQKGGDGSDDDEDQAPQPKKRQPKKR

SEQ ID NO: 885 - protein, 33 aa, Artificial Sequence
  Chemically Synthesized
KKRKKGGGSSGSGGEQGEGGEEGEGGEKKKKKR

SEQ ID NO: 886 - protein, 34 aa, Artificial Sequence
  Chemically Synthesized
KKRPEVLTIHENSRQENYETETVQVKQAKPNKKR

SEQ ID NO: 887 - protein, 39 aa, Artificial Sequence
  Chemically Synthesized
KKRKHKLQETKGKIKKSESVQNTDPTEEADSSVKKKKKR

SEQ ID NO: 888 - protein, 44 aa, Artificial Sequence
  Chemically Synthesized
KKRKNRKKPTILEGKETETPVEKTPEGASGEGKKNKNKKKNKKR

SEQ ID NO: 889 - protein, 39 aa, Artificial Sequence
  Chemically Synthesized
KKRKKNFMMMRHSQNVRTKGKRSFREKQIALRDSLLKKR

SEQ ID NO: 890 - protein, 31 aa, Artificial Sequence
  Chemically Synthesized
KKRRARSRSNSRSKHRHRSRSRSKSREKKKR

SEQ ID NO: 891 - protein, 42 aa, Artificial Sequence
  Chemically Synthesized
KKRRKTCKTSTTDSRSSRLEEDPVGQDIPDESNAQSSPKKKR

SEQ ID NO: 892 - protein, 39 aa, Artificial Sequence
  Chemically Synthesized
KKRDEERRRELEERRKKEQEEQLRRLREEEREEEERKKR

SEQ ID NO: 893 - protein, 26 aa, Artificial Sequence
  Chemically Synthesized
KKRSYKDLLREEEEIAEQVRKSSKKR

SEQ ID NO: 894 - protein, 34 aa, Artificial Sequence
  Chemically Synthesized
KKREREQSETASTAPVEPFTLPKPVEVVVEEKKR

SEQ ID NO: 895 - protein, 31 aa, Artificial Sequence
  Chemically Synthesized
KKRAALSILQELKKLPVLPVVEKPKVHYKKR

SEQ ID NO: 896 - protein, 26 aa, Artificial Sequence
  Chemically Synthesized
KKRRRREGESDTEEEQTQPDGEGKKR

SEQ ID NO: 897 - protein, 30 aa, Artificial Sequence
  Chemically Synthesized
KKRRRREGESDTEEEQTQPDGEGKKRRKKR

SEQ ID NO: 898 - protein, 31 aa, Artificial Sequence
  Chemically Synthesized
KKRRPRSRSRSRSKHRHRSKSRSKSREKKKR

SEQ ID NO: 899 - protein, 34 aa, Artificial Sequence
  Chemically Synthesized
KKRECAANGVDFERAKLLEISAEDAERWERKKKR

SEQ ID NO: 900 - protein, 46 aa, Artificial Sequence
  Chemically Synthesized
KKRKELDDVSEDVETLEMVFESRDLDWEEQTANGDQEAQSNKRKKR

SEQ ID NO: 901 - protein, 30 aa, Artificial Sequence
  Chemically Synthesized
KKRAQRILIFLLEFLLDFCTGEDSVDGKKR

SEQ ID NO: 902 - protein, 41 aa, Artificial Sequence
  Chemically Synthesized
KKRAPKLRATCSSSGLDNLYNAVANIAKASSLRVEVIHKKR

SEQ ID NO: 903 - protein, 41 aa, Artificial Sequence; identical to SEQ ID NO: 902
  Chemically Synthesized

SEQ ID NO: 904 - protein, 45 aa, Artificial Sequence
  Chemically Synthesized
KKRRYFMDIWMKDSSGQEFFIEIKPKKETQPPVKPAHLTTAAKKR

SEQ ID NO: 905 - protein, 35 aa, Artificial Sequence
  Chemically Synthesized
KKREILIRSLQMIKRQAVKSAANQRNPMGGSWKKR

SEQ ID NO: 906 - protein, 37 aa, Artificial Sequence
  Chemically Synthesized
KKRPCKVKRKLFGSENIRPNKKIPLASDVDNELEKKR

SEQ ID NO: 907 - protein, 26 aa, Artificial Sequence
  Chemically Synthesized
KKRMDDTEKRKLQEDRRNEKQDLKKR

SEQ ID NO: 908 - protein, 28 aa, Artificial Sequence
  Chemically Synthesized
KKRYRSPSSDRSLSRDRSSSRDRSYKKR

SEQ ID NO: 909 - protein, 41 aa, Artificial Sequence
  Chemically Synthesized
KKRRPGRGDTSATSDGGTSPKRPLRDSWNLLPQRRAAHKKR

SEQ ID NO: 910 - protein, 26 aa, Artificial Sequence
  Chemically Synthesized
KKRVVGLESCSNVLKTRLMRFALKKR

What is claimed is:

1. A method for treating a viral infection, the method comprising administering to the subject: (a) CRISPR RNA (crRNA) comprising guide sequence substantially complementary to a viral RNA sequence and (b) a Cas protein or nucleic acid encoding the Cas protein.

2. The method of claim 1, wherein the Cas protein is Cas13.

3. The method of claim 1 or 2, wherein the Cas protein comprises a sequence at least 80% identical to a sequence selected from SEQ ID NOs:1-47.

4. The method of any of claims 1-3, wherein the Cas protein further comprises a localization signal or export signal.

5. The method of claim 4, wherein the Cas protein comprises an NES, wherein the NES comprises a sequence at least 80% identical to SEQ ID NOs:58-59.

6. The method of claim 4, wherein the Cas protein comprises a nuclear localization signal (NLS), wherein the NLS comprises a sequence at least 80% identical to SEQ ID NOs: 50-57 and 298-910.

7. The method of claim 4, wherein the Cas protein comprises a localization signal, wherein the localization signal comprises a sequence at least 80% identical to SEQ ID NOs: 60-66.

8. The method of any of claims 1-4, wherein the Cas protein comprises a sequence at least 80% identical to SEQ ID NOs:68-100.

9. The method of any of claims 1-8, wherein the nucleic acid encoding the Cas protein comprises a sequence at least 80% identical to SEQ ID NOs:132-133.

10. The method of any of claims 1-8, wherein the nucleic acid encoding the Cas protein comprises a sequence at least 80% identical to SEQ ID NOs:147-166.

11. The method of any of claims 1-10, wherein the viral infection is a coronavirus infection and the guide sequence is substantially complementary to a Coronavirus genomic mRNA sequence or a Coronavirus subgenomic mRNA sequence.

12. The method of claim 11, wherein the guide sequence is substantially complementary to a Coronavirus leader sequence, Coronavirus S sequence, Coronavirus E sequence, Coronavirus M sequence, N sequence, or Coronavirus S2M sequence.

13. The method of claim 11 or claim 12, wherein the guide sequence is substantially complementary to a sequence at least at least 80% homologous to a sequence selected from SEQ ID NOs: 168-174, 176-181, 186, and 187.

14. The method of any of claims 11-13, wherein the guide sequence comprises a sequence at least at least 80% homologous to a sequence selected from SEQ ID NOs: 189-224.

15. The method of any of claims 1-10, wherein the viral infection is an influenza infection and the guide sequence comprises is substantially complementary to an influenza virus genomic RNA sequence or an influenza virus subgenomic RNA sequence.

16. The method of claim 15, wherein the guide sequence is substantially complementary to an influenza virus PB2 sequence, influenza virus PB1 sequence, influenza virus PA sequence, influenza virus NP sequence, or influenza virus M sequence.

17. The method of claim 15 or claim 16, wherein the guide sequence is substantially complementary to a sequence at least 80% homologous to a sequence selected from SEQ ID NOs:225-244.

18. The method of any of claims 15-17, wherein the guide sequence comprises a sequence at least 80% homologous to a sequence selected from SEQ ID NOs: 245-264.

19. The method of any of claims 1-18, wherein the crRNA further comprises a direct repeat (DR) sequence.

20. The method of claim 19 wherein the DR sequence is 3′ from the guide sequence.

21. The method of claim 19 or claim 20, wherein the DR sequence comprises a sequence selected from SEQ ID NOs: 265-274.

22. A delivery system comprising: a packaging plasmid a transfer plasmid, and an envelope plasmid, wherein the packaging plasmid comprises a nucleic acid sequence encoding a gag-pol polyprotein; the transfer plasmid comprises a nucleic acid sequence encoding a crRNA sequence and a nucleic acid sequence encoding a Cas protein; and the envelope plasmid comprises a nucleic acid sequence encoding an envelope protein.

23. The delivery system of claim 22, wherein the Cas protein comprises a sequence at least 80% identical to a sequence selected from SEQ ID NOs:1-47.

24. The delivery system of claim 22 or claim 23, wherein the Cas protein further comprises a localization signal or export signal.

25. The delivery system of claim 24, wherein the localization signal or export signal comprises a sequence 80% identical to a sequence selected from SEQ ID NOs:50-66 and 298-910.

26. The delivery system of any of claims 22-25, wherein the envelope protein is a coronavirus spike glycoprotein.

27. The delivery system of any of claims 22-26, wherein the envelope protein comprises a sequence at least 80% identical to a sequence selected from SEQ ID NOs:101-130.

28. The delivery system of any of claims 22-27, wherein the crRNA sequence comprises a guide sequence substantially complementary to a Coronavirus genomic mRNA sequence or a Coronavirus subgenomic mRNA sequence.

29. The delivery system of claim 28, wherein the guide sequence is substantially complementary to a Coronavirus leader sequence, Coronavirus S sequence, Coronavirus E sequence, Coronavirus M sequence, N sequence, or Coronavirus S2M sequence.

30. The delivery system of claim 28 or claim 29, wherein the guide sequence is substantially complementary to a sequence at least at least 80% homologous to a sequence selected from SEQ ID NOs: 168-174, 176-181, 186, and 187.

31. The delivery system of any of claims 28-30, wherein the guide sequence comprises a sequence at least at least 80% homologous to a sequence selected from SEQ ID NOs: 189-224.

32. The delivery system of claim 22-25, wherein the envelope protein comprises one or more proteins selected from influenza virus HA protein and influenza virus NA protein.

33. The delivery system of any of claims 22-26 and 32-33, wherein the crRNA sequence comprises a guide sequence substantially complementary to an influenza virus genomic RNA sequence or an influenza virus subgenomic RNA sequence.

34. The delivery system of claim 33, wherein the guide sequence is substantially complementary to an influenza virus PB2 sequence, influenza virus PB1 sequence, influenza virus PA sequence, influenza virus NP sequence, or influenza virus M sequence.

35. The delivery system of claim 33 or claim 34, wherein the guide sequence is substantially complementary to a sequence at least 80% homologous to a sequence selected from SEQ ID NOs:225-244.

36. The delivery system of any of claims 33-35, wherein the guide sequence comprises a sequence at least 80% homologous to a sequence selected from SEQ ID NOs: 245-264.

37. A CRISPR RNA (crRNA) comprising a guide sequence, wherein the guide sequence is substantially complementary to a Coronavirus genomic mRNA sequence or a Coronavirus subgenomic mRNA sequence.

38. The crRNA of claim 37, wherein the guide sequence is substantially complementary to a Coronavirus leader sequence, Coronavirus S sequence, Coronavirus E sequence, Coronavirus M sequence, N sequence, or Coronavirus S2M sequence.

39. The crRNA of claim 37 or claim 38, wherein the guide sequence is substantially complementary to a sequence at least 80% homologous to a sequence selected from SEQ ID NOs: 168-174, 176-181, 186, and 187.

40. The crRNA of any of claims 37-39, wherein the guide sequence comprises a sequence at least 80% homologous to a sequence selected from SEQ ID NOs: 189-224.

41. A CRISPR RNA (crRNA) comprising a guide sequence, wherein the guide sequence is substantially complementary to an influenza virus genomic RNA sequence or an influenza virus subgenomic RNA sequence.

42. The crRNA of claim 41, wherein the guide sequence is substantially complementary to an influenza virus PB2 sequence, influenza virus PB1 sequence, influenza virus PA sequence, influenza virus NP sequence, or influenza virus M sequence.

43. The crRNA of claim 41 or claim 42, wherein the guide sequence is substantially complementary to a sequence at least 80% homologous to a sequence selected from SEQ ID NOs: 225-244.

44. The crRNA of claim 43, wherein the guide sequence comprises a sequence at least 80% homologous to a sequence selected from SEQ ID NOs: 245-264.

45. The crRNA of any of claims 37-44, wherein the crRNA further comprises a direct repeat (DR) sequence.

46. The crRNA of claim 45, wherein the DR sequence is 3′ from the guide sequence.

47. The crRNA of claim 44 or claim 45, wherein the DR sequence comprises a sequence selected from SEQ ID NOs: 265-274.

48. A tandem array comprising at least two crRNA of any of claims 37-40.

49. A tandem array comprising at least two crRNA of any of claims 41-43.

50. A composition comprising the crRNA of any of claims 37-47 or the tandem array of any of claims 48-49.

51. The composition of claim 50, wherein the composition further comprises a Cas protein or a nucleic acid encoding a Cas protein.

52. The composition of claim 51, wherein the Cas protein is Cas13.

53. The composition of claim 50 or claim 51, wherein the Cas protein comprises a sequence at least 80% identical to a sequence selected from SEQ ID NOs:1-47.

54. The composition of any of claims 51-53, wherein the Cas protein further comprises a localization signal or export signal.

55. The composition of any of claim 54, wherein the localization signal or export signal comprises a sequence 80% identical to a sequence selected from SEQ ID NOs:50-66 and 298-910.

56. The composition of any of claim 54, wherein the Cas protein comprises a sequence 80% identical to a sequence selected from SEQ ID NOs: 68-100.
